(19) United States
(12) Patent Application Publication
(10) Pub. No.: US 2008/0039413 A1
(43) Pub. Date: Feb. 14, 2008

(54) Novel compositions and methods in cancer

(76) Inventors: David W. Morris, Davis, CA (US); Marc S. Malandro, Davis, CA (US)

Correspondence Address: NOVARTIS VACCINES AND DIAGNOSTICS, INC.;CORPORATE INTELLECTUAL PROPERTY-R338, P.O. BOX 8097, EMERYVILLE, CA, 94662-8097, US

(21) Appl. No.: 10/692,382

(22) Filed: Oct. 22, 2003

Related U.S. Application Data
(63) Continuation-in-part of application No. 10/691,209, filed on Oct. 21, 2003, now abandoned.

(51) Int. Cl. A61K 31/713; A61P 35/00; C07H 21/00; C07K 14/00; C07K 16/00; C07K 2/00; C12N 1/00; C12N 15/63; C12N 5/12; C12Q 1/02; C12Q 1/68; C40B 40/06; C40B 40/10; G01N 33/53

(52) U.S. Cl. 514/44; 435/243; 435/29; 435/320.1; 435/346; 435/6; 435/7.1; 506/16; 506/18; 514/789; 530/300; 530/350; 530/387.3; 530/388.1; 530/389.1; 536/23.1

(57) ABSTRACT

The present invention relates to novel sequences for use in detection, diagnosis and treatment of cancers, especially lymphomas. The invention provides cancer-associated (CA) polynucleotide sequences whose expression is associated with cancer. The present invention provides CA polypeptides associated with cancer that are present on the cell surface and present novel therapeutic targets against cancer. The present invention further provides diagnostic compositions and methods for the detection of cancer. The present invention provides monoclonal and polyclonal antibodies specific for the CA polypeptides. The present invention also provides diagnostic tools and therapeutic compositions and methods for screening, prevention and treatment of cancer.

### CROSS-REFERENCE TO RELATED APPLICATIONS

[0001] This application is a continuation-in-part of U.S. application Ser. No. ______ (Attorney Docket No. 52945-20024.00) filed Oct. 21, 2003. This application is related to the following U.S. Applications: U.S. Ser. No. 10/034,650, filed Dec. 20, 2001; U.S. Ser. No. 10/035,832, filed Dec. 26, 2001; U.S. Ser. No. 10/004,113, filed Oct. 23, 2001; U.S. Ser. No. 09/997,722, filed Nov. 30, 2001; U.S. Ser. No. 10/085,117, filed Feb. 27, 2002; U.S. Ser. No. 10/087,192, filed Mar. 1, 2002; U.S. Ser. No. 10/322,281, filed Dec. 17, 2002; U.S. Ser. No. 10/322,696, filed Dec. 17, 2002, U.S. Ser. No. 10/331,053, filed Dec. 26, 2002; U.S. Ser. No. 10/330,773, filed Dec. 27, 2002; U.S. Ser. No. 10/367,094, filed Feb. 14, 2003; U.S. Ser. No. 10/388,838, filed Mar. 14, 2003, U.S. Ser. No. 10/417,375 filed Apr. 15, 2003, U.S. Ser. No. 10/461,862, filed Jun. 13, 2003, U.S. Ser. No. 10/663,431 filed Sep. 15, 2003, U.S. Ser. No. 10/322,281 filed Sep. 23, 2003, U.S. Ser. No. 10/670,914, filed Sep. 24, 2003, U.S. Ser. No. 10/676,684 filed Sep. 30, 2003, and U.S. Ser. No. 10/674,575, filed Sep. 29, 2003, all of which are expressly incorporated herein by reference in their entirety.

### DESCRIPTION OF ACCOMPANYING CD-ROMs

[0002] Tables 1-336 are filed herewith in CD-ROM in accordance with 37 C.F.R. §§ 1.52 and 1.58. Two identical copies (marked “Copy 1” and “Copy 2”) of this CD-ROM are submitted.

[0003] Contents of the CD-ROM disks submitted herewith are hereby incorporated by reference into the Specification.

### TECHNICAL FIELD OF THE INVENTION

[0004] This invention relates generally to the field of cancer-associated genes. Specifically, it relates to novel sequences for use in diagnosis and treatment of cancer and tumors, as well as the use of the novel compositions in screening methods. The present invention provides methods of using cancer associated polynucleotides, their corresponding gene products and antibodies specific for the gene products in the detection, diagnosis, prevention and/or treatment of associated cancers.

### BACKGROUND OF THE INVENTION

[0005] Oncogenes are genes that can cause cancer. Carcinogenesis can occur by a wide variety of mechanisms, including infection of cells by viruses containing oncogenes, activation of protooncogenes in the host genome, and mutations of protooncogenes and tumor suppressor genes. Carcinogenesis is fundamentally driven by somatic cell evolution (i.e. mutation and natural selection of variants with progressive loss of growth control). The genes that serve as targets for these somatic mutations are classified as either protooncogenes or tumor suppressor genes, depending on whether their mutant phenotypes are dominant or recessive, respectively.

[0006] There are a number of viruses known to be involved in human cancer as well as in animal cancer. Of particular interest here are viruses that do not contain oncogenes themselves; these are slow-transforming retroviruses. They induce tumors by integrating into the host genome and affecting neighboring protooncogenes in a variety of ways. Provirus insertion mutation is a normal consequence of the retroviral life cycle. In infected cells, a DNA copy of the retrovirus genome (called a provirus) is integrated into the host genome. A newly integrated provirus can affect gene expression in cis at or near the integration site by one of two mechanisms. Type I insertion mutations up-regulate transcription of proximal genes as a consequence of regulatory sequences (enhancers and/or promoters) within the proviral long terminal repeats (LTRs). Type II insertion mutations cause truncation of coding regions due to either integration directly within an open reading frame or integration within an intron flanked on both sides by coding sequences. The analysis of sequences at or near the insertion sites has led to the identification of a number of new protooncogenes.

[0007] With respect to lymphoma and leukemia, retroviruses such as AKV murine leukemia virus (MLV) or SL3-3 MLV, are potent inducers of tumors when inoculated into susceptible newborn mice, or when carried in the germ line. A number of sequences have been identified as relevant in the induction of lymphoma and leukemia by analyzing the insertion sites; see Sorensen et al., J. of Virology 74:2161 (2000); Hansen et al., Genome Res. 10(2):237-43 (2000); Sorensen et al., J. Virology 70:4063 (1996); Sorensen et al., J. Virology 67:7118 (1993); Joosten et al., Virology 268:308 (2000); and Li et al., Nature Genetics 23:348 (1999); all of which are expressly incorporated by reference herein. With respect to cancers, especially breast cancer, prostate cancer and cancers with epithelial origin, the mammalian retrovirus, mouse mammary tumor virus (MMTV) is a potent inducer of tumors when inoculated into susceptible newborn mice, or when carried in the germ line. Mammary Tumors in the Mouse, edited by J. Hilgers and M. Sluyser; Elsevier/North-Holland Biomedical Press; New York, N.Y.

[0008] The pattern of gene expression in a particular living cell is characteristic of its current state. Nearly all differences in the state or type of a cell are reflected in the differences in RNA levels of one or more genes. Comparing expression patterns of uncharacterized genes may provide clues to their function. High throughput analysis of expression of hundreds or thousands of genes can help in (a) identification of complex genetic diseases, (b) analysis of differential gene expression over time, between tissues and disease states, and (c) drug discovery and toxicology studies. Increase or decrease in the levels of expression of certain genes correlate with cancer biology. For example, oncogenes are positive regulators of tumorigenesis, while tumor suppressor genes are negative regulators of tumorigenesis. (Marshall, Cell, 64: 313-326 (1991); Weinberg, Science, 254: 1138-1146 (1991)).

[0009] Accordingly, it is an object of the invention to provide polynucleotide and polypeptide sequences involved in cancer and, in particular, in oncogenesis.

[0010] Immunotherapy, or the use of antibodies for therapeutic purposes has been used in recent years to treat cancer. Passive immunotherapy involves the use of monoclonal antibodies in cancer treatments. See for example, Cancer: Principles and Practice of Oncology, 6^{th} Edition (2001) Chapt. 20 pp. 495-508. Inherent therapeutic biological activity of these antibodies include direct inhibition of tumor cell growth or survival, and the ability to recruit the natural cell killing activity of the body's immune system. These agents are administered alone or in conjunction with radiation or chemotherapeutic agents. Rituxan® and Herceptin®, approved for treatment of lymphoma and breast cancer, respectively, are two examples of such therapeutics. Alternatively, antibodies are used to make antibody conjugates where the antibody is linked to a toxic agent and directs that agent to the tumor by specifically binding to the tumor. Mylotarg® is an example of an approved antibody conjugate used for the treatment of leukemia.

[0011] Accordingly, it is another object of this invention to provide antigens (cancer-associated polypeptides) associated with a variety of cancers as targets for diagnostic and/or therapeutic antibodies. These antigens are also useful for drug discovery (e.g., small molecules) and for further characterization of cellular regulation, growth, and differentiation.

### SUMMARY OF THE INVENTION

[0012] In accordance with the objects outlined above, the present invention provides methods for screening for compositions that modulate cancer, especially lymphoma and leukemia. The present invention also provides methods for screening for compositions which modulate carcinomas, especially mammary adenocarcinomas. Also provided herein are methods of inhibiting proliferation of a cell, preferably a lymphoma cell or a breast cancer cell. Methods of treatment of cancer, including diagnosis, are also provided herein.

[0013] In one aspect, a method of screening drug candidates comprises providing a cell that expresses a cancer-associated (CA) gene or fragments thereof. Preferred embodiments of CA genes are genes that are differentially expressed in cancer cells, preferably lymphatic, breast, prostate or epithelial cells, compared to other cells. Preferred embodiments of CA genes used in the methods herein include, but are not limited to the nucleic acids selected from Tables 1-336 (human genomic sequences of SEQ ID NOS: 12, 20, 30, 48, 58, 76, 86, 94, 112, 126, 146, 154, 160, 180, 206, 216, 224, 236, 244, 252, 260, 272, 284, 300, 306, 316, 326, 332, 343, 363, 375, 395, 407, 415, 425, 431, 447, 458, 468, 476, 482, 490, 502, 516, 530, 540, 548, 554, 572, 588, 596, 604, 612, 620, 626, 636, 642, 667, 673, 679, 687, 696, 702, 708, 716, 726, 738, 748, 756, 764, 772, 782, 792, 802, 820, 830, 848, 866, 874, 894, 900, 908, 918, 926, 936, 942, 950, 960, 968, 980, 998, 1012, 1026, 1034, 1048, 1057, 1077, 1087, 1095, 1101, 1107, 1121, 1127, 1133, 1141, 1149, 1155, 1165, 1173, 1183, 1191, 1207, 1217, 1225, 1237, 1243, 1253, 1271, 1287, 1301, 1309, 1327, 1333, 1347, 1355, 1361, 1367, 1379, 1389, 1397, 1400, 1416, 1436, 1456, 1462, 1474, 1482, 1490, 1499, 1507, 1515, 1533, 1539, 1549, 1559, 1571, 1579, 1589, 1603, 1619, 1625, 1633, 1643, 1649, 1657, 1669, 1675, 1685, 1691, 1699, 1711, 1719, 1731, 1743, 1751, 1764, 1772, 1793, 1799, 1811, 1817, 1829, 1839, 1849, 1855, 1863, 1869, 1877, 1883, 1893, 1909, 1923, 1933, 1953, 1969, 1981, 1999, 2015, 2033, 2043, 2051, 2061, 2077, 2089, 2107, 2113, 2125, 2137, 2145, 2153, 2161, 2173, 2183, 2193, 2203, 2215, 2225, 2231, 2237, 2243, 2253, 2263, 2271, 2281, 2289, 2297, 2305, 2320, 2338, 2354, 2365, 2383, 2395, 2405, 2419, 2427, 2435, 2453, 2469, 2488, 2510, 2518, 2524, 2536, 2546, 2556, 2570, 2588, 2608, 2618, 2628, 2638, 2648, 2660, 2674, 2686, 2706, 2712, 2718, 2728, 2740, 2754, 2764, 2784, 2792, 2800, 2808, 2816, 2822, 2828, 2840, 2850, 2863, 2882, 2892, 2906, 2922, 2930, 2942, 2950, 2960, 2966, 2980, 2986, 2998, 3010, 3016, 3028, 3038, 3043, 3049, 3059, 3075, 3085, 3097, 3111, 3121, 3131, 3149, 3155, 3165, 3171, 3185, 3195, 3211, 3225, 3233, 3247, 3255, 3263, 3279, 3285, 3295, 3303, 3313, 3319, 3333, 3339, 3350, 3364, 3372, 3380, 3394, 3404, 3414, 3428, 3436, 3444, 3460, 3468, 3480, 3486, and 3500, and sequences of SEQ ID NOS: 13, 21, 23, 25, 31, 33, 35, 37, 39, 41, 43, 49, 51, 53, 59, 61, 63, 77, 79, 81, 87, 89, 95, 97, 99, 113, 115, 117, 127, 129, 131, 133, 135, 137, 139, 141, 147, 149, 155, 161, 163, 165, 167, 169, 171, 173, 175, 181, 183, 185, 187, 189, 191, 193, 195, 197, 199, 201, 207, 209, 211, 217, 219, 225, 227, 229, 231, 237, 239, 245, 253, 255, 261, 263, 265, 267, 273, 275, 277, 279, 285, 287, 289, 301, 307, 309, 311, 317, 319, 321, 327, 333, 335, 344, 346, 348, 350, 352, 354, 364, 366, 376, 378, 380, 382, 384, 386, 388, 390, 396, 408, 410, 416, 418, 426, 432, 434, 436, 438, 440, 442, 448, 459, 461, 463, 469, 471, 477, 483, 485, 491, 493, 495, 497, 503, 505, 507, 509, 511, 517, 519, 521, 523, 525, 531, 533, 535, 541, 543, 549, 555, 557, 559, 561, 563, 565, 573, 575, 577, 579, 581, 589, 591, 597, 599, 605, 607, 613, 615, 621, 627, 629, 631, 637, 643, 645, 647, 649, 651, 653, 655, 657, 668, 674, 680, 682, 688, 697, 703, 709, 711, 717, 719, 721, 727, 729, 731, 733, 739, 741, 743, 749, 751, 757, 759, 765, 767, 773, 775, 783, 785, 787, 793, 795, 797, 803, 805, 807, 809, 811, 821, 823, 825, 831, 833, 835, 837, 839, 841, 843, 849, 851, 853, 867, 869, 875, 877, 879, 881, 883, 895, 901, 903, 909, 911, 913, 919, 921, 927, 929, 931, 937, 943, 945, 951, 953, 955, 961, 963, 969, 971, 973, 975, 981, 983, 985, 987, 999, 1001, 1003, 1005, 1007, 1013, 1015, 1017, 1019, 1021, 1027, 1029, 1035, 1037, 1039, 1041, 1043, 1049, 1058, 1060, 1062, 1064, 1066, 1068, 1070, 1072, 1078, 1080, 1082, 1088, 1090, 1096, 1102, 1108, 1110, 1112, 1114, 1116, 1122, 1128, 1134, 1136, 1142, 1144, 1150, 1156, 1158, 1160, 1166, 1168, 1174, 1176, 1178, 1184, 1186, 1192, 1194, 1196, 1208, 1210, 1212, 1218, 1220, 1226, 1228, 1230, 1232, 1238, 1244, 1246, 1248, 1254, 1256, 1258, 1260, 1262, 1264, 1266, 1272, 1274, 1276, 1278, 1280, 1282, 1288, 1290, 1292, 1294, 1296, 1302, 1304, 1310, 1312, 1314, 1316, 1328, 1334, 1336, 1338, 1340, 1348, 1350, 1356, 1362, 1368, 1370, 1372, 1374, 1380, 1382, 1384, 1390, 1392, 1398, 1401, 1403, 1405, 1407, 1409, 1417, 1419, 1421, 1423, 1425, 1427, 1437, 1439, 1441, 1443, 1445, 1447, 1449, 1451, 1457, 1463, 1465, 1467, 1469, 1475, 1483, 1485, 1491, 1500, 1502, 1508, 1510, 1516, 1518, 1520, 1522, 1524, 1534, 1540, 1542, 1550, 1552, 1554, 1560, 1562, 1564, 1566, 1572, 1574, 1580, 1582, 1584, 1590, 1592, 1604, 1606, 1608, 1610, 1612, 1614, 1620, 1626, 1628, 1634, 1636, 1644, 1650, 1658, 1660, 1662, 1664, 1670, 1676, 1678, 1680, 1686, 1692, 1694, 1700, 1702, 1704, 1706, 1712, 1714, 1720, 1722, 1732, 1734, 1736, 1738, 1744, 1746, 1752, 1754, 1765, 1767, 1773, 1775, 1777, 1779, 1781, 1794, 1800, 1802, 1804, 1806, 1812, 1818, 1820, 1822, 1830, 1832, 1834, 1840, 1842, 1844, 1850, 1856, 1858, 1864, 1870, 1872, 1878, 1884, 1886, 1894, 1896, 1898, 1900, 1902, 1904, 1910, 1912, 1914, 1916, 1918, 1924, 1926, 1928, 1934, 1936, 1938, 1954, 1956, 1958, 1960, 1962, 1964, 1970, 1972, 1982, 1984, 1986, 2000, 2002, 2004, 2006, 2016, 2018, 2020, 2022, 2024, 2034, 2036, 2038, 2044, 2046, 2052, 2054, 2056, 2062, 2064, 2066, 2068, 2070, 2072, 2078, 2080, 2082, 2090, 2092, 2094, 2096, 2098, 2108, 2114, 2116, 2118, 2120, 2126, 2128, 2130, 2138, 2140, 2146, 2148, 2154, 2156, 2162, 2164, 2166, 2168, 2174, 2176, 2178, 2184, 2186, 2188, 2194, 2196, 2198, 2204, 2206, 2208, 2216, 2218, 2220, 2226, 2232, 2238, 2244, 2246, 2248, 2254, 2256, 2258, 2264, 2266, 2272, 2274, 2276, 2282, 2284, 2290, 2292, 2298, 2300, 2306, 2308, 2310, 2312, 2314, 2316, 2318, 2321, 2323, 2325, 2327, 2329, 2331, 2333, 2339, 2341, 2343, 2345, 2355, 2366, 2368, 2370, 2372, 2384, 2386, 2388, 2390, 2396, 2398, 2406, 2408, 2410, 2412, 2420, 2422, 2428, 2430, 2436, 2438, 2454, 2456, 2458, 2460, 2470, 2472, 2474, 2476, 2478, 2489, 2491, 2493, 2495, 2497, 2499, 2501, 2503, 2505, 2511, 2513, 2519, 2525, 2527, 2529, 2531, 2537, 2539, 2541, 2547, 2549, 2551, 2557, 2559, 2561, 2563, 2571, 2573, 2575, 2577, 2589, 2591, 2593, 2595, 2597, 2599, 2601, 2603, 2609, 2611, 2613, 2619, 2621, 2623, 2629, 2631, 2639, 2641, 2649, 2651, 2653, 2655, 2661, 2663, 2665, 2667, 2669, 2675, 2677, 2679, 2681, 2687, 2689, 2691, 2693, 2695, 2697, 2699, 2701, 2707, 2713, 2719, 2721, 2729, 2731, 2733, 2741, 2743, 2745, 2747, 2755, 2757, 2759, 2765, 2767, 2769, 2771, 2785, 2793, 2795, 2801, 2809, 2811, 2817, 2823, 2829, 2831, 2833, 2835, 2841, 2843, 2845, 2851, 2853, 2855, 2857, 2859, 2861, 2864, 2866, 2868, 2870, 2872, 2874, 2883, 2885, 2887, 2893, 2895, 2897, 2899, 2907, 2909, 2911, 2913, 2915, 2917, 2923, 2925, 2931, 2933, 2935, 2937, 2943, 2951, 2953, 2955, 2961, 2967, 2969, 2971, 2973, 2975, 2981, 2987, 2989, 2991, 2993, 2999, 3001, 3003, 3011, 3017, 3019, 3021, 3029, 3039, 3041, 3044, 3050, 3052, 3054, 3060, 3062, 3064, 3066, 3068, 3076, 3086, 3088, 3090, 3092, 3098, 3100, 3102, 3104, 3106, 3112, 3114, 3116, 3122, 3124, 3126, 3132, 3134, 3136, 3138, 3140, 3142, 3144, 3150, 3156, 3158, 3160, 3166, 3172, 3174, 3186, 3188, 3190, 3196, 3198, 3200, 3202, 3204, 3212, 3214, 3216, 3218, 3220, 3226, 3228, 3234, 3236, 3238, 3248, 3250, 3256, 3258, 3264, 3266, 3268, 3270, 3272, 3280, 3286, 3288, 3296, 3298, 3304, 3306, 3308, 3314, 3320, 3322, 3324, 3326, 3328, 3334, 3340, 3342, 3351, 3353, 3365, 3367, 3373, 3375, 3381, 3383, 3385, 3387, 3389, 3395, 3397, 3405, 3407, 3415, 3417, 3419, 3421, 3423, 3429, 3431, 3437, 3445, 3447, 3449, 3451, 3453, 3455, 3461, 3463, 3469, 3471, 3473, 3481, 3487, 3489, 3491, 3493, 3501, and 3503 corresponding to the human mRNAs generated therefrom). The methods further include adding a drug candidate to the cell and determining the effect of the drug candidate on the expression of the CA gene.

[0014] In one embodiment, the method of screening drug candidates includes comparing the level of expression in the absence of the drug candidate to the level of expression in the presence of the drug candidate.

[0015] Also provided herein is a method of screening for a bioactive agent capable of binding to a CA protein (CAP), the method comprising combining the CAP and a candidate bioactive agent, and determining the binding of the candidate agent to the CAP.

[0016] Further provided herein is a method for screening for a bioactive agent capable of modulating the activity of a CAP. In one embodiment, the method comprises combining the CAP and a candidate bioactive agent, and determining the effect of the candidate agent on the bioactivity of the CAP.

[0017] Also provided is a method of evaluating the effect of a candidate cancer drug comprising administering the drug to a patient and removing a cell sample from the patient. The expression profile of the cell is then determined. This method may further comprise comparing the expression profile of the patient to an expression profile of a healthy individual.

[0018] In a further aspect, a method for inhibiting the activity of a CA protein is provided. In one embodiment, the method comprises administering to a patient an inhibitor of a CA protein preferably selected from the group consisting of the sequences outlined in Tables 1-336 (SEQ ID NOS: 14, 22, 24, 26, 32, 34, 36, 38, 40, 42, 44, 50, 52, 54, 60, 62, 64, 78, 80, 82, 88, 90, 96, 98, 100, 114, 116, 118, 128, 130, 132, 134, 136, 138, 140, 142, 148, 150, 156, 162, 164, 166, 168, 170, 172, 174, 176, 182, 184, 186, 188, 190, 192, 194, 196, 198, 200, 202, 208, 210, 212, 218, 220, 226, 228, 230, 232, 238, 240, 246, 254, 256, 262, 264, 266, 268, 274, 276, 278, 280, 286, 288, 290, 302, 308, 310, 312, 318, 320, 322, 328, 334, 336, 345, 347, 349, 351, 353, 355, 365, 367, 377, 379, 381, 383, 385, 387, 389, 391, 397, 409, 411, 417, 419, 427, 433, 435, 437, 439, 441, 443, 449, 460, 462, 464, 470, 472, 478, 484, 486, 492, 494, 496, 498, 504, 506, 508, 510, 512, 518, 520, 522, 524, 526, 532, 534, 536, 542, 544, 550, 556, 558, 560, 562, 564, 566, 574, 576, 578, 580, 582, 590, 592, 598, 600, 606, 608, 614, 616, 622, 628, 630, 632, 638, 644, 646, 648, 650, 652, 654, 656, 658, 669, 675, 681, 683, 689, 698, 704, 710, 712, 718, 720, 722, 728, 730, 732, 734, 740, 742, 744, 750, 752, 758, 760, 766, 768, 774, 776, 784, 786, 788, 794, 796, 798, 804, 806, 808, 810, 812, 822, 824, 826, 832, 834, 836, 838, 840, 842, 844, 850, 852, 854, 868, 870, 876, 878, 880, 882, 884, 896, 902, 904, 910, 912, 914, 920, 922, 928, 930, 932, 938, 944, 946, 952, 954, 956, 962, 964, 970, 972, 974, 976, 982, 984, 986, 988, 1000, 1002, 1004, 1006, 1008, 1014, 1016, 1018, 1020, 1022, 1028, 1030, 1036, 1038, 1040, 1042, 1044, 1050, 1059, 1061, 1063, 1065, 1067, 1069, 1071, 1073, 1079, 1081, 1083, 1089, 1091, 1097, 1103, 1109, 1111, 1113, 1115, 1117, 1123, 1129, 1135, 1137, 1143, 1145, 1151, 1157, 1159, 1161, 1167, 1169, 1175, 1177, 1179, 1185, 1187, 1193, 1195, 1197, 1209, 1211, 1213, 1219, 1221, 1227, 1229, 1231, 1233, 1239, 1245, 1247, 1249, 1255, 1257, 1259, 1261, 1263, 1265, 1267, 1273, 1275, 1277, 1279, 1281, 1283, 1289, 1291, 1293, 1295, 1297, 1303, 1305, 1311, 1313, 1315, 1317, 1329, 1335, 1337, 1339, 1341, 1349, 1351, 1357, 1363, 1369, 1371, 1373, 1375, 1381, 1383, 1385, 1391, 1393, 1399, 1402, 1404, 1406, 1408, 1410, 1418, 1420, 1422, 1424, 1426, 1428, 1438, 1440, 1442, 1444, 1446, 1448, 1450, 1452, 1458, 1464, 1466, 1468, 1470, 1476, 1484, 1486, 1492, 1501, 1503, 1509, 1511, 1517, 1519, 1521, 1523, 1525, 1535, 1541, 1543, 1551, 1553, 1555, 1561, 1563, 1565, 1567, 1573, 1575, 1581, 1583, 1585, 1591, 1593, 1605, 1607, 1609, 1611, 1613, 1615, 1621, 1627, 1629, 1635, 1637, 1645, 1651, 1659, 1661, 1663, 1665, 1671, 1677, 1679, 1681, 1687, 1693, 1695, 1701, 1703, 1705, 1707, 1713, 1715, 1721, 1723, 1733, 1735, 1737, 1739, 1745, 1747, 1753, 1755, 1766, 1768, 1774, 1776, 1778, 1780, 1782, 1795, 1801, 1803, 1805, 1807, 1813, 1819, 1821, 1823, 1831, 1833, 1835, 1841, 1843, 1845, 1851, 1857, 1859, 1865, 1871, 1873, 1879, 1885, 1887, 1895, 1897, 1899, 1901, 1903, 1905, 1911, 1913, 1915, 1917, 1919, 1925, 1927, 1929, 1935, 1937, 1939, 1955, 1957, 1959, 1961, 1963, 1965, 1971, 1973, 1983, 1985, 1987, 2001, 2003, 2005, 2007, 2017, 2019, 2021, 2023, 2025, 2035, 2037, 2039, 2045, 2047, 2053, 2055, 2057, 2063, 2065, 2067, 2069, 2071, 2073, 2079, 2081, 2083, 2091, 2093, 2095, 2097, 2099, 2109, 2115, 2117, 2119, 2121, 2127, 2129, 2131, 2139, 2141, 2147, 2149, 2155, 2157, 2163, 2165, 2167, 2169, 2175, 2177, 2179, 2185, 2187, 2189, 2195, 2197, 2199, 2205, 2207, 2209, 2217, 2219, 2221, 2227, 2233, 2239, 2245, 2247, 2249, 2255, 2257, 2259, 2265, 2267, 2273, 2275, 2277, 2283, 2285, 2291, 2293, 2299, 2301, 2307, 2309, 2311, 2313, 2315, 2317, 2319, 2322, 2324, 2326, 2328, 2330, 2332, 2334, 2340, 2342, 2344, 2346, 2356, 2367, 2369, 2371, 2373, 2385, 2387, 2389, 2391, 2397, 2399, 2407, 2409, 2411, 2413, 2421, 2423, 2429, 2431, 2437, 2439, 2455, 2457, 2459, 2461, 2471, 2473, 2475, 2477, 2479, 2490, 2492, 2494, 2496, 2498, 2500, 2502, 2504, 2506, 2512, 2514, 2520, 2526, 2528, 2530, 2532, 2538, 2540, 2542, 2548, 2550, 2552, 2558, 2560, 2562, 2564, 2572, 2574, 2576, 2578, 2590, 2592, 2594, 2596, 2598, 2600, 2602, 2604, 2610, 2612, 2614, 2620, 2622, 2624, 2630, 2632, 2640, 2642, 2650, 2652, 2654, 2656, 2662, 2664, 2666, 2668, 2670, 2676, 2678, 2680, 2682, 2688, 2690, 2692, 2694, 2696, 2698, 2700, 2702, 2708, 2714, 2720, 2722, 2730, 2732, 2734, 2742, 2744, 2746, 2748, 2756, 2758, 2760, 2766, 2768, 2770, 2772, 2786, 2794, 2796, 2802, 2810, 2812, 2818, 2824, 2830, 2832, 2834, 2836, 2842, 2844, 2846, 2852, 2854, 2856, 2858, 2860, 2862, 2865, 2867, 2869, 2871, 2873, 2875, 2884, 2886, 2888, 2894, 2896, 2898, 2900, 2908, 2910, 2912, 2914, 2916, 2918, 2924, 2926, 2932, 2934, 2936, 2938, 2944, 2952, 2954, 2956, 2962, 2968, 2970, 2972, 2974, 2976, 2982, 2988, 2990, 2992, 2994, 3000, 3002, 3004, 3012, 3018, 3020, 3022, 3030, 3040, 3042, 3045, 3051, 3053, 3055, 3061, 3063, 3065, 3067, 3069, 3077, 3087, 3089, 3091, 3093, 3099, 3101, 3103, 3105, 3107, 3113, 3115, 3117, 3123, 3125, 3127, 3133, 3135, 3137, 3139, 3141, 3143, 3145, 3151, 3157, 3159, 3161, 3167, 3173, 3175, 3187, 3189, 3191, 3197, 3199, 3201, 3203, 3205, 3213, 3215, 3217, 3219, 3221, 3227, 3229, 3235, 3237, 3239, 3249, 3251, 3257, 3259, 3265, 3267, 3269, 3271, 3273, 3281, 3287, 3289, 3297, 3299, 3305, 3307, 3309, 3315, 3321, 3323, 3325, 3327, 3329, 3335, 3341, 3343, 3352, 3354, 3366, 3368, 3374, 3376, 3382, 3384, 3386, 3388, 3390, 3396, 3398, 3406, 3408, 3416, 3418, 3420, 3422, 3424, 3430, 3432, 3438, 3446, 3448, 3450, 3452, 3454, 3456, 3462, 3464, 3470, 3472, 3474, 3482, 3488, 3490, 3492, 3494, 3502, and 3504).

[0019] A method of neutralizing the effect of a CA protein, preferably a protein encoded by a nucleic acid selected from the group of sequences outlined in Tables 1-336 (human genomic sequences of SEQ ID NOS: 12, 20, 30, 48, 58, 76, 86, 94, 112, 126, 146, 154, 160, 180, 206, 216, 224, 236, 244, 252, 260, 272, 284, 300, 306, 316, 326, 332, 343, 363, 375, 395, 407, 415, 425, 431, 447, 458, 468, 476, 482, 490, 502, 516, 530, 540, 548, 554, 572, 588, 596, 604, 612, 620, 626, 636, 642, 667, 673, 679, 687, 696, 702, 708, 716, 726, 738, 748, 756, 764, 772, 782, 792, 802, 820, 830, 848, 866, 874, 894, 900, 908, 918, 926, 936, 942, 950, 960, 968, 980, 998, 1012, 1026, 1034, 1048, 1057, 1077, 1087, 1095, 1101, 1107, 1121, 1127, 1133, 1141, 1149, 1155, 1165, 1173, 1183, 1191, 1207, 1217, 1225, 1237, 1243, 1253, 1271, 1287, 1301, 1309, 1327, 1333, 1347, 1355, 1361, 1367, 1379, 1389, 1397, 1400, 1416, 1436, 1456, 1462, 1474, 1482, 1490, 1499, 1507, 1515, 1533, 1539, 1549, 1559, 1571, 1579, 1589, 1603, 1619, 1625, 1633, 1643, 1649, 1657, 1669, 1675, 1685, 1691, 1699, 1711, 1719, 1731, 1743, 1751, 1764, 1772, 1793, 1799, 1811, 1817, 1829, 1839, 1849, 1855, 1863, 1869, 1877, 1883, 1893, 1909, 1923, 1933, 1953, 1969, 1981, 1999, 2015, 2033, 2043, 2051, 2061, 2077, 2089, 2107, 2113, 2125, 2137, 2145, 2153, 2161, 2173, 2183, 2193, 2203, 2215, 2225, 2231, 2237, 2243, 2253, 2263, 2271, 2281, 2289, 2297, 2305, 2320, 2338, 2354, 2365, 2383, 2395, 2405, 2419, 2427, 2435, 2453, 2469, 2488, 2510, 2518, 2524, 2536, 2546, 2556, 2570, 2588, 2608, 2618, 2628, 2638, 2648, 2660, 2674, 2686, 2706, 2712, 2718, 2728, 2740, 2754, 2764, 2784, 2792, 2800, 2808, 2816, 2822, 2828, 2840, 2850, 2863, 2882, 2892, 2906, 2922, 2930, 2942, 2950, 2960, 2966, 2980, 2986, 2998, 3010, 3016, 3028, 3038, 3043, 3049, 3059, 3075, 3085, 3097, 3111, 3121, 3131, 3149, 3155, 3165, 3171, 3185, 3195, 3211, 3225, 3233, 3247, 3255, 3263, 3279, 3285, 3295, 3303, 3313, 3319, 3333, 3339, 3350, 3364, 3372, 3380, 3394, 3404, 3414, 3428, 3436, 3444, 3460, 3468, 3480, 3486, and 3500, and sequences of SEQ ID NOS: 13, 21, 23, 25, 31, 33, 35, 37, 39, 41, 43, 49, 51, 53, 59, 61, 63, 77, 79, 81, 87, 89, 95, 97, 99, 113, 115, 117, 127, 129, 131, 133, 135, 137, 139, 141, 147, 149, 155, 161, 163, 165, 167, 169, 171, 173, 175, 181, 183, 185, 187, 189, 191, 193, 195, 197, 199, 201, 207, 209, 211, 217, 219, 225, 227, 229, 231, 237, 239, 245, 253, 255, 261, 263, 265, 267, 273, 275, 277, 279, 285, 287, 289, 301, 307, 309, 311, 317, 319, 321, 327, 333, 335, 344, 346, 348, 350, 352, 354, 364, 366, 376, 378, 380, 382, 384, 386, 388, 390, 396, 408, 410, 416, 418, 426, 432, 434, 436, 438, 440, 442, 448, 459, 461, 463, 469, 471, 477, 483, 485, 491, 493, 495, 497, 503, 505, 507, 509, 511, 517, 519, 521, 523, 525, 531, 533, 535, 541, 543, 549, 555, 557, 559, 561, 563, 565, 573, 575, 577, 579, 581, 589, 591, 597, 599, 605, 607, 613, 615, 621, 627, 629, 631, 637, 643, 645, 647, 649, 651, 653, 655, 657, 668, 674, 680, 682, 688, 697, 703, 709, 711, 717, 719, 721, 727, 729, 731, 733, 739, 741, 743, 749, 751, 757, 759, 765, 767, 773, 775, 783, 785, 787, 793, 795, 797, 803, 805, 807, 809, 811, 821, 823, 825, 831, 833, 835, 837, 839, 841, 843, 849, 851, 853, 867, 869, 875, 877, 879, 881, 883, 895, 901, 903, 909, 911, 913, 919, 921, 927, 929, 931, 937, 943, 945, 951, 953, 955, 961, 963, 969, 971, 973, 975, 981, 983, 985, 987, 999, 1001, 1003, 1005, 1007, 1013, 1015, 1017, 1019, 1021, 1027, 1029, 1035, 1037, 1039, 1041, 1043, 1049, 1058, 1060, 1062, 1064, 1066, 1068, 1070, 1072, 1078, 1080, 1082, 1088, 1090, 1096, 1102, 1108, 1110, 1112, 1114, 1116, 1122, 1128, 1134, 1136, 1142, 1144, 1150, 1156, 1158, 1160, 1166, 1168, 1174, 1176, 1178, 1184, 1186, 1192, 1194, 1196, 1208, 1210, 1212, 1218, 1220, 1226, 1228, 1230, 1232, 1238, 1244, 1246, 1248, 1254, 1256, 1258, 1260, 1262, 1264, 1266, 1272, 1274, 1276, 1278, 1280, 1282, 1288, 1290, 1292, 1294, 1296, 1302, 1304, 1310, 1312, 1314, 1316, 1328, 1334, 1336, 1338, 1340, 1348, 1350, 1356, 1362, 1368, 1370, 1372, 1374, 1380, 1382, 1384, 1390, 1392, 1398, 1401, 1403, 1405, 1407, 1409, 1417, 1419, 1421, 1423, 1425, 1427, 1437, 1439, 1441, 1443, 1445, 1447, 1449, 1451, 1457, 1463, 1465, 1467, 1469, 1475, 1483, 1485, 1491, 1500, 1502, 1508, 1510, 1516, 1518, 1520, 1522, 1524, 1534, 1540, 1542, 1550, 1552, 1554, 1560, 1562, 1564, 1566, 1572, 1574, 1580, 1582, 1584, 1590, 1592, 1604, 1606, 1608, 1610, 1612, 1614, 1620, 1626, 1628, 1634, 1636, 1644, 1650, 1658, 1660, 1662, 1664, 1670, 1676, 1678, 1680, 1686, 1692, 1694, 1700, 1702, 1704, 1706, 1712, 1714, 1720, 1722, 1732, 1734, 1736, 1738, 1744, 1746, 1752, 1754, 1765, 1767, 1773, 1775, 1777, 1779, 1781, 1794, 1800, 1802, 1804, 1806, 1812, 1818, 1820, 1822, 1830, 1832, 1834, 1840, 1842, 1844, 1850, 1856, 1858, 1864, 1870, 1872, 1878, 1884, 1886, 1894, 1896, 1898, 1900, 1902, 1904, 1910, 1912, 1914, 1916, 1918, 1924, 1926, 1928, 1934, 1936, 1938, 1954, 1956, 1958, 1960, 1962, 1964, 1970, 1972, 1982, 1984, 1986, 2000, 2002, 2004, 2006, 2016, 2018, 2020, 2022, 2024, 2034, 2036, 2038, 2044, 2046, 2052, 2054, 2056, 2062, 2064, 2066, 2068, 2070, 2072, 2078, 2080, 2082, 2090, 2092, 2094, 2096, 2098, 2108, 2114, 2116, 2118, 2120, 2126, 2128, 2130, 2138, 2140, 2146, 2148, 2154, 2156, 2162, 2164, 2166, 2168, 2174, 2176, 2178, 2184, 2186, 2188, 2194, 2196, 2198, 2204, 2206, 2208, 2216, 2218, 2220, 2226, 2232, 2238, 2244, 2246, 2248, 2254, 2256, 2258, 2264, 2266, 2272, 2274, 2276, 2282, 2284, 2290, 2292, 2298, 2300, 2306, 2308, 2310, 2312, 2314, 2316, 2318, 2321, 2323, 2325, 2327, 2329, 2331, 2333, 2339, 2341, 2343, 2345, 2355, 2366, 2368, 2370, 2372, 2384, 2386, 2388, 2390, 2396, 2398, 2406, 2408, 2410, 2412, 2420, 2422, 2428, 2430, 2436, 2438, 2454, 2456, 2458, 2460, 2470, 2472, 2474, 2476, 2478, 2489, 2491, 2493, 2495, 2497, 2499, 2501, 2503, 2505, 2511, 2513, 2519, 2525, 2527, 2529, 2531, 2537, 2539, 2541, 2547, 2549, 2551, 2557, 2559, 2561, 2563, 2571, 2573, 2575, 2577, 2589, 2591, 2593, 2595, 2597, 2599, 2601, 2603, 2609, 2611, 2613, 2619, 2621, 2623, 2629, 2631, 2639, 2641, 2649, 2651, 2653, 2655, 2661, 2663, 2665, 2667, 2669, 2675, 2677, 2679, 2681, 2687, 2689, 2691, 2693, 2695, 2697, 2699, 2701, 2707, 2713, 2719, 2721, 2729, 2731, 2733, 2741, 2743, 2745, 2747, 2755, 2757, 2759, 2765, 2767, 2769, 2771, 2785, 2793, 2795, 2801, 2809, 2811, 2817, 2823, 2829, 2831, 2833, 2835, 2841, 2843, 2845, 2851, 2853, 2855, 2857, 2859, 2861, 2864, 2866, 2868, 2870, 2872, 2874, 2883, 2885, 2887, 2893, 2895, 2897, 2899, 2907, 2909, 2911, 2913, 2915, 2917, 2923, 2925, 2931, 2933, 2935, 2937, 2943, 2951, 2953, 2955, 2961, 2967, 2969, 2971, 2973, 2975, 2981, 2987, 2989, 2991, 2993, 2999, 3001, 3003, 3011, 3017, 3019, 3021, 3029, 3039, 3041, 3044, 3050, 3052, 3054, 3060, 3062, 3064, 3066, 3068, 3076, 3086, 3088, 3090, 3092, 3098, 3100, 3102, 3104, 3106, 3112, 3114, 3116, 3122, 3124, 3126, 3132, 3134, 3136, 3138, 3140, 3142, 3144, 3150, 3156, 3158, 3160, 3166, 3172, 3174, 3186, 3188, 3190, 3196, 3198, 3200, 3202, 3204, 3212, 3214, 3216, 3218, 3220, 3226, 3228, 3234, 3236, 3238, 3248, 3250, 3256, 3258, 3264, 3266, 3268, 3270, 3272, 3280, 3286, 3288, 3296, 3298, 3304, 3306, 3308, 3314, 3320, 3322, 3324, 3326, 3328, 3334, 3340, 3342, 3351, 3353, 3365, 3367, 3373, 3375, 3381, 3383, 3385, 3387, 3389, 3395, 3397, 3405, 3407, 3415, 3417, 3419, 3421, 3423, 3429, 3431, 3437, 3445, 3447, 3449, 3451, 3453, 3455, 3461, 3463, 3469, 3471, 3473, 3481, 3487, 3489, 3491, 3493, 3501, and 3503 corresponding to the human mRNAs generated therefrom), is also provided. Preferably, the method comprises contacting an agent specific for said protein with said protein in an amount sufficient to effect neutralization.

[0020] Moreover, provided herein is a biochip comprising a nucleic acid segment which encodes a CA protein, preferably selected from the sequences outlined in Tables 1-336 (SEQ ID NOS: 13, 21, 23, 25, 31, 33, 35, 37, 39, 41, 43, 49, 51, 53, 59, 61, 63, 77, 79, 81, 87, 89, 95, 97, 99, 113, 115, 117, 127, 129, 131, 133, 135, 137, 139, 141, 147, 149, 155, 161, 163, 165, 167, 169, 171, 173, 175, 181, 183, 185, 187, 189, 191, 193, 195, 197, 199, 201, 207, 209, 211, 217, 219, 225, 227, 229, 231, 237, 239, 245, 253, 255, 261, 263, 265, 267, 273, 275, 277, 279, 285, 287, 289, 301, 307, 309, 311, 317, 319, 321, 327, 333, 335, 344, 346, 348, 350, 352, 354, 364, 366, 376, 378, 380, 382, 384, 386, 388, 390, 396, 408, 410, 416, 418, 426, 432, 434, 436, 438, 440, 442, 448, 459, 461, 463, 469, 471, 477, 483, 485, 491, 493, 495, 497, 503, 505, 507, 509, 511, 517, 519, 521, 523, 525, 531, 533, 535, 541, 543, 549, 555, 557, 559, 561, 563, 565, 573, 575, 577, 579, 581, 589, 591, 597, 599, 605, 607, 613, 615, 621, 627, 629, 631, 637, 643, 645, 647, 649, 651, 653, 655, 657, 668, 674, 680, 682, 688, 697, 703, 709, 711, 717, 719, 721, 727, 729, 731, 733, 739, 741, 743, 749, 751, 757, 759, 765, 767, 773, 775, 783, 785, 787, 793, 795, 797, 803, 805, 807, 809, 811, 821, 823, 825, 831, 833, 835, 837, 839, 841, 843, 849, 851, 853, 867, 869, 875, 877, 879, 881, 883, 895, 901, 903, 909, 911, 913, 919, 921, 927, 929, 931, 937, 943, 945, 951, 953, 955, 961, 963, 969, 971, 973, 975, 981, 983, 985, 987, 999, 1001, 1003, 1005, 1007, 1013, 1015, 1017, 1019, 1021, 1027, 1029, 1035, 1037, 1039, 1041, 1043, 1049, 1058, 1060, 1062, 1064, 1066, 1068, 1070, 1072, 1078, 1080, 1082, 1088, 1090, 1096, 1102, 1108, 1110, 1112, 1114, 1116, 1122, 1128, 1134, 1136, 1142, 1144, 1150, 1156, 1158, 1160, 1166, 1168, 1174, 1176, 1178, 1184, 1186, 1192, 1194, 1196, 1208, 1210, 1212, 1218, 1220, 1226, 1228, 1230, 1232, 1238, 1244, 1246, 1248, 1254, 1256, 1258, 1260, 1262, 1264, 1266, 1272, 1274, 1276, 1278, 1280, 1282, 1288, 1290, 1292, 1294, 1296, 1302, 1304, 1310, 1312, 1314, 1316, 1328, 1334, 1336, 1338, 1340, 1348, 1350, 1356, 1362, 1368, 1370, 1372, 1374, 1380, 1382, 1384, 1390, 1392, 1398, 1401, 1403, 1405, 1407, 1409, 1417, 1419, 1421, 1423, 1425, 1427, 1437, 1439, 1441, 1443, 1445, 1447, 1449, 1451, 1457, 1463, 1465, 1467, 1469, 1475, 1483, 1485, 1491, 1500, 1502, 1508, 1510, 1516, 1518, 1520, 1522, 1524, 1534, 1540, 1542, 1550, 1552, 1554, 1560, 1562, 1564, 1566, 1572, 1574, 1580, 1582, 1584, 1590, 1592, 1604, 1606, 1608, 1610, 1612, 1614, 1620, 1626, 1628, 1634, 1636, 1644, 1650, 1658, 1660, 1662, 1664, 1670, 1676, 1678, 1680, 1686, 1692, 1694, 1700, 1702, 1704, 1706, 1712, 1714, 1720, 1722, 1732, 1734, 1736, 1738, 1744, 1746, 1752, 1754, 1765, 1767, 1773, 1775, 1777, 1779, 1781, 1794, 1800, 1802, 1804, 1806, 1812, 1818, 1820, 1822, 1830, 1832, 1834, 1840, 1842, 1844, 1850, 1856, 1858, 1864, 1870, 1872, 1878, 1884, 1886, 1894, 1896, 1898, 1900, 1902, 1904, 1910, 1912, 1914, 1916, 1918, 1924, 1926, 1928, 1934, 1936, 1938, 1954, 1956, 1958, 1960, 1962, 1964, 1970, 1972, 1982, 1984, 1986, 2000, 2002, 2004, 2006, 2016, 2018, 2020, 2022, 2024, 2034, 2036, 2038, 2044, 2046, 2052, 2054, 2056, 2062, 2064, 2066, 2068, 2070, 2072, 2078, 2080, 2082, 2090, 2092, 2094, 2096, 2098, 2108, 2114, 2116, 2118, 2120, 2126, 2128, 2130, 2138, 2140, 2146, 2148, 2154, 2156, 2162, 2164, 2166, 2168, 2174, 2176, 2178, 2184, 2186, 2188, 2194, 2196, 2198, 2204, 2206, 2208, 2216, 2218, 2220, 2226, 2232, 2238, 2244, 2246, 2248, 2254, 2256, 2258, 2264, 2266, 2272, 2274, 2276, 2282, 2284, 2290, 2292, 2298, 2300, 2306, 2308, 2310, 2312, 2314, 2316, 2318, 2321, 2323, 2325, 2327, 2329, 2331, 2333, 2339, 2341, 2343, 2345, 2355, 2366, 2368, 2370, 2372, 2384, 2386, 2388, 2390, 2396, 2398, 2406, 2408, 2410, 2412, 2420, 2422, 2428, 2430, 2436, 2438, 2454, 2456, 2458, 2460, 2470, 2472, 2474, 2476, 2478, 2489, 2491, 2493, 2495, 2497, 2499, 2501, 2503, 2505, 2511, 2513, 2519, 2525, 2527, 2529, 2531, 2537, 2539, 2541, 2547, 2549, 2551, 2557, 2559, 2561, 2563, 2571, 2573, 2575, 2577, 2589, 2591, 2593, 2595, 2597, 2599, 2601, 2603, 2609, 2611, 2613, 2619, 2621, 2623, 2629, 2631, 2639, 2641, 2649, 2651, 2653, 2655, 2661, 2663, 2665, 2667, 2669, 2675, 2677, 2679, 2681, 2687, 2689, 2691, 2693, 2695, 2697, 2699, 2701, 2707, 2713, 2719, 2721, 2729, 2731, 2733, 2741, 2743, 2745, 2747, 2755, 2757, 2759, 2765, 2767, 2769, 2771, 2785, 2793, 2795, 2801, 2809, 2811, 2817, 2823, 2829, 2831, 2833, 2835, 2841, 2843, 2845, 2851, 2853, 2855, 2857, 2859, 2861, 2864, 2866, 2868, 2870, 2872, 2874, 2883, 2885, 2887, 2893, 2895, 2897, 2899, 2907, 2909, 2911, 2913, 2915, 2917, 2923, 2925, 2931, 2933, 2935, 2937, 2943, 2951, 2953, 2955, 2961, 2967, 2969, 2971, 2973, 2975, 2981, 2987, 2989, 2991, 2993, 2999, 3001, 3003, 3011, 3017, 3019, 3021, 3029, 3039, 3041, 3044, 3050, 3052, 3054, 3060, 3062, 3064, 3066, 3068, 3076, 3086, 3088, 3090, 3092, 3098, 3100, 3102, 3104, 3106, 3112, 3114, 3116, 3122, 3124, 3126, 3132, 3134, 3136, 3138, 3140, 3142, 3144, 3150, 3156, 3158, 3160, 3166, 3172, 3174, 3186, 3188, 3190, 3196, 3198, 3200, 3202, 3204, 3212, 3214, 3216, 3218, 3220, 3226, 3228, 3234, 3236, 3238, 3248, 3250, 3256, 3258, 3264, 3266, 3268, 3270, 3272, 3280, 3286, 3288, 3296, 3298, 3304, 3306, 3308, 3314, 3320, 3322, 3324, 3326, 3328, 3334, 3340, 3342, 3351, 3353, 3365, 3367, 3373, 3375, 3381, 3383, 3385, 3387, 3389, 3395, 3397, 3405, 3407, 3415, 3417, 3419, 3421, 3423, 3429, 3431, 3437, 3445, 3447, 3449, 3451, 3453, 3455, 3461, 3463, 3469, 3471, 3473, 3481, 3487, 3489, 3491, 3493, 3501, and 3503).

[0021] Also provided herein is a method for diagnosing or determining the propensity to cancers, especially lymphoma or leukemia or carcinoma by sequencing at least one carcinoma or lymphoma gene of an individual. In yet another aspect of the invention, a method is provided for determining cancer including lymphoma and leukemia gene copy numbers in an individual.

[0022] The invention provides an isolated nucleic acid comprising at least 10, 12, 15, or 30 contiguous nucleotides of a sequence selected from the group consisting of the polynucleotide sequences SEQ ID NOS: 13, 21, 23, 25, 31, 33, 35, 37, 39, 41, 43, 49, 51, 53, 59, 61, 63, 77, 79, 81, 87, 89, 95, 97, 99, 113, 115, 117, 127, 129, 131, 133, 135, 137, 139, 141, 147, 149, 155, 161, 163, 165, 167, 169, 171, 173, 175, 181, 183, 185, 187, 189, 191, 193, 195, 197, 199, 201, 207, 209, 211, 217, 219, 225, 227, 229, 231, 237, 239, 245, 253, 255, 261, 263, 265, 267, 273, 275, 277, 279, 285, 287, 289, 301, 307, 309, 311, 317, 319, 321, 327, 333, 335, 344, 346, 348, 350, 352, 354, 364, 366, 376, 378, 380, 382, 384, 386, 388, 390, 396, 408, 410, 416, 418, 426, 432, 434, 436, 438, 440, 442, 448, 459, 461, 463, 469, 471, 477, 483, 485, 491, 493, 495, 497, 503, 505, 507, 509, 511, 517, 519, 521, 523, 525, 531, 533, 535, 541, 543, 549, 555, 557, 559, 561, 563, 565, 573, 575, 577, 579, 581, 589, 591, 597, 599, 605, 607, 613, 615, 621, 627, 629, 631, 637, 643, 645, 647, 649, 651, 653, 655, 657, 668, 674, 680, 682, 688, 697, 703, 709, 711, 717, 719, 721, 727, 729, 731, 733, 739, 741, 743, 749, 751, 757, 759, 765, 767, 773, 775, 783, 785, 787, 793, 795, 797, 803, 805, 807, 809, 811, 821, 823, 825, 831, 833, 835, 837, 839, 841, 843, 849, 851, 853, 867, 869, 875, 877, 879, 881, 883, 895, 901, 903, 909, 911, 913, 919, 921, 927, 929, 931, 937, 943, 945, 951, 953, 955, 961, 963, 969, 971, 973, 975, 981, 983, 985, 987, 999, 1001, 1003, 1005, 1007, 1013, 1015, 1017, 1019, 1021, 1027, 1029, 1035, 1037, 1039, 1041, 1043, 1049, 1058, 1060, 1062, 1064, 1066, 1068, 1070, 1072, 1078, 1080, 1082, 1088, 1090, 1096, 1102, 1108, 1110, 1112, 1114, 1116, 1122, 1128, 1134, 1136, 1142, 1144, 1150, 1156, 1158, 1160, 1166, 1168, 1174, 1176, 1178, 1184, 1186, 1192, 1194, 1196, 1208, 1210, 1212, 1218, 1220, 1226, 1228, 1230, 1232, 1238, 1244, 1246, 1248, 1254, 1256, 1258, 1260, 1262, 1264, 1266, 1272, 1274, 1276, 1278, 1280, 1282, 1288, 1290, 1292, 1294, 1296, 1302, 1304, 1310, 1312, 1314, 1316, 1328, 1334, 1336, 1338, 1340, 1348, 1350, 1356, 1362, 1368, 1370, 1372, 1374, 1380, 1382, 1384, 1390, 1392, 1398, 1401, 1403, 1405, 1407, 1409, 1417, 1419, 1421, 1423, 1425, 1427, 1437, 1439, 1441, 1443, 1445, 1447, 1449, 1451, 1457, 1463, 1465, 1467, 1469, 1475, 1483, 1485, 1491, 1500, 1502, 1508, 1510, 1516, 1518, 1520, 1522, 1524, 1534, 1540, 1542, 1550, 1552, 1554, 1560, 1562, 1564, 1566, 1572, 1574, 1580, 1582, 1584, 1590, 1592, 1604, 1606, 1608, 1610, 1612, 1614, 1620, 1626, 1628, 1634, 1636, 1644, 1650, 1658, 1660, 1662, 1664, 1670, 1676, 1678, 1680, 1686, 1692, 1694, 1700, 1702, 1704, 1706, 1712, 1714, 1720, 1722, 1732, 1734, 1736, 1738, 1744, 1746, 1752, 1754, 1765, 1767, 1773, 1775, 1777, 1779, 1781, 1794, 1800, 1802, 1804, 1806, 1812, 1818, 1820, 1822, 1830, 1832, 1834, 1840, 1842, 1844, 1850, 1856, 1858, 1864, 1870, 1872, 1878, 1884, 1886, 1894, 1896, 1898, 1900, 1902, 1904, 1910, 1912, 1914, 1916, 1918, 1924, 1926, 1928, 1934, 1936, 1938, 1954, 1956, 1958, 1960, 1962, 1964, 1970, 1972, 1982, 1984, 1986, 2000, 2002, 2004, 2006, 2016, 2018, 2020, 2022, 2024, 2034, 2036, 2038, 2044, 2046, 2052, 2054, 2056, 2062, 2064, 2066, 2068, 2070, 2072, 2078, 2080, 2082, 2090, 2092, 2094, 2096, 2098, 2108, 2114, 2116, 2118, 2120, 2126, 2128, 2130, 2138, 2140, 2146, 2148, 2154, 2156, 2162, 2164, 2166, 2168, 2174, 2176, 2178, 2184, 2186, 2188, 2194, 2196, 2198, 2204, 2206, 2208, 2216, 2218, 2220, 2226, 2232, 2238, 2244, 2246, 2248, 2254, 2256, 2258, 2264, 2266, 2272, 2274, 2276, 2282, 2284, 2290, 2292, 2298, 2300, 2306, 2308, 2310, 2312, 2314, 2316, 2318, 2321, 2323, 2325, 2327, 2329, 2331, 2333, 2339, 2341, 2343, 2345, 2355, 2366, 2368, 2370, 2372, 2384, 2386, 2388, 2390, 2396, 2398, 2406, 2408, 2410, 2412, 2420, 2422, 2428, 2430, 2436, 2438, 2454, 2456, 2458, 2460, 2470, 2472, 2474, 2476, 2478, 2489, 2491, 2493, 2495, 2497, 2499, 2501, 2503, 2505, 2511, 2513, 2519, 2525, 2527, 2529, 2531, 2537, 2539, 2541, 2547, 2549, 2551, 2557, 2559, 2561, 2563, 2571, 2573, 2575, 2577, 2589, 2591, 2593, 2595, 2597, 2599, 2601, 2603, 2609, 2611, 2613, 2619, 2621, 2623, 2629, 2631, 2639, 2641, 2649, 2651, 2653, 2655, 2661, 2663, 2665, 2667, 2669, 2675, 2677, 2679, 2681, 2687, 2689, 2691, 2693, 2695, 2697, 2699, 2701, 2707, 2713, 2719, 2721, 2729, 2731, 2733, 2741, 2743, 2745, 2747, 2755, 2757, 2759, 2765, 2767, 2769, 2771, 2785, 2793, 2795, 2801, 2809, 2811, 2817, 2823, 2829, 2831, 2833, 2835, 2841, 2843, 2845, 2851, 2853, 2855, 2857, 2859, 2861, 2864, 2866, 2868, 2870, 2872, 2874, 2883, 2885, 2887, 2893, 2895, 2897, 2899, 2907, 2909, 2911, 2913, 2915, 2917, 2923, 2925, 2931, 2933, 2935, 2937, 2943, 2951, 2953, 2955, 2961, 2967, 2969, 2971, 2973, 2975, 2981, 2987, 2989, 2991, 2993, 2999, 3001, 3003, 3011, 3017, 3019, 3021, 3029, 3039, 3041, 3044, 3050, 3052, 3054, 3060, 3062, 3064, 3066, 3068, 3076, 3086, 3088, 3090, 3092, 3098, 3100, 3102, 3104, 3106, 3112, 3114, 3116, 3122, 3124, 3126, 3132, 3134, 3136, 3138, 3140, 3142, 3144, 3150, 3156, 3158, 3160, 3166, 3172, 3174, 3186, 3188, 3190, 3196, 3198, 3200, 3202, 3204, 3212, 3214, 3216, 3218, 3220, 3226, 3228, 3234, 3236, 3238, 3248, 3250, 3256, 3258, 3264, 3266, 3268, 3270, 3272, 3280, 3286, 3288, 3296, 3298, 3304, 3306, 3308, 3314, 3320, 3322, 3324, 3326, 3328, 3334, 3340, 3342, 3351, 3353, 3365, 3367, 3373, 3375, 3381, 3383, 3385, 3387, 3389, 3395, 3397, 3405, 3407, 3415, 3417, 3419, 3421, 3423, 3429, 3431, 3437, 3445, 3447, 3449, 3451, 3453, 3455, 3461, 3463, 3469, 3471, 3473, 3481, 3487, 3489, 3491, 3493, 3501, and 3503 shown in Tables 1-336, or its complement, or an expression vector comprising the isolated nucleic acids and host cells comprising them.

[0023] In some embodiments, the polynucleotide, or its complement or a fragment thereof, further comprises a detectable label, is attached to a solid support, is prepared at least in part by chemical synthesis, is an antisense fragment, is single stranded, is double stranded or comprises a microarray.

[0024] The invention provides an isolated polypeptide, encoded within an open reading frame of a CA sequence selected from the group consisting of the polynucleotide sequences of SEQ ID NOS: 12, 20, 30, 48, 58, 76, 86, 94, 112, 126, 146, 154, 160, 180, 206, 216, 224, 236, 244, 252, 260, 272, 284, 300, 306, 316, 326, 332, 343, 363, 375, 395, 407, 415, 425, 431, 447, 458, 468, 476, 482, 490, 502, 516, 530, 540, 548, 554, 572, 588, 596, 604, 612, 620, 626, 636, 642, 667, 673, 679, 687, 696, 702, 708, 716, 726, 738, 748, 756, 764, 772, 782, 792, 802, 820, 830, 848, 866, 874, 894, 900, 908, 918, 926, 936, 942, 950, 960, 968, 980, 998, 1012, 1026, 1034, 1048, 1057, 1077, 1087, 1095, 1101, 1107, 1121, 1127, 1133, 1141, 1149, 1155, 1165, 1173, 1183, 1191, 1207, 1217, 1225, 1237, 1243, 1253, 1271, 1287, 1301, 1309, 1327, 1333, 1347, 1355, 1361, 1367, 1379, 1389, 1397, 1400, 1416, 1436, 1456, 1462, 1474, 1482, 1490, 1499, 1507, 1515, 1533, 1539, 1549, 1559, 1571, 1579, 1589, 1603, 1619, 1625, 1633, 1643, 1649, 1657, 1669, 1675, 1685, 1691, 1699, 1711, 1719, 1731, 1743, 1751, 1764, 1772, 1793, 1799, 1811, 1817, 1829, 1839, 1849, 1855, 1863, 1869, 1877, 1883, 1893, 1909, 1923, 1933, 1953, 1969, 1981, 1999, 2015, 2033, 2043, 2051, 2061, 2077, 2089, 2107, 2113, 2125, 2137, 2145, 2153, 2161, 2173, 2183, 2193, 2203, 2215, 2225, 2231, 2237, 2243, 2253, 2263, 2271, 2281, 2289, 2297, 2305, 2320, 2338, 2354, 2365, 2383, 2395, 2405, 2419, 2427, 2435, 2453, 2469, 2488, 2510, 2518, 2524, 2536, 2546, 2556, 2570, 2588, 2608, 2618, 2628, 2638, 2648, 2660, 2674, 2686, 2706, 2712, 2718, 2728, 2740, 2754, 2764, 2784, 2792, 2800, 2808, 2816, 2822, 2828, 2840, 2850, 2863, 2882, 2892, 2906, 2922, 2930, 2942, 2950, 2960, 2966, 2980, 2986, 2998, 3010, 3016, 3028, 3038, 3043, 3049, 3059, 3075, 3085, 3097, 3111, 3121, 3131, 3149, 3155, 3165, 3171, 3185, 3195, 3211, 3225, 3233, 3247, 3255, 3263, 3279, 3285, 3295, 3303, 3313, 3319, 3333, 3339, 3350, 3364, 3372, 3380, 3394, 3404, 3414, 3428, 3436, 3444, 3460, 3468, 3480, 3486, and 3500 shown in Tables 1-336, or its complement. The invention provides an isolated polypeptide, wherein said polypeptide comprises the amino acid sequence encoded by a polynucleotide selected from the group consisting of SEQ ID NOS: 13, 21, 23, 25, 31, 33, 35, 37, 39, 41, 43, 49, 51, 53, 59, 61, 63, 77, 79, 81, 87, 89, 95, 97, 99, 113, 115, 117, 127, 129, 131, 133, 135, 137, 139, 141, 147, 149, 155, 161, 163, 165, 167, 169, 171, 173, 175, 181, 183, 185, 187, 189, 191, 193, 195, 197, 199, 201, 207, 209, 211, 217, 219, 225, 227, 229, 231, 237, 239, 245, 253, 255, 261, 263, 265, 267, 273, 275, 277, 279, 285, 287, 289, 301, 307, 309, 311, 317, 319, 321, 327, 333, 335, 344, 346, 348, 350, 352, 354, 364, 366, 376, 378, 380, 382, 384, 386, 388, 390, 396, 408, 410, 416, 418, 426, 432, 434, 436, 438, 440, 442, 448, 459, 461, 463, 469, 471, 477, 483, 485, 491, 493, 495, 497, 503, 505, 507, 509, 511, 517, 519, 521, 523, 525, 531, 533, 535, 541, 543, 549, 555, 557, 559, 561, 563, 565, 573, 575, 577, 579, 581, 589, 591, 597, 599, 605, 607, 613, 615, 621, 627, 629, 631, 637, 643, 645, 647, 649, 651, 653, 655, 657, 668, 674, 680, 682, 688, 697, 703, 709, 711, 717, 719, 721, 727, 729, 731, 733, 739, 741, 743, 749, 751, 757, 759, 765, 767, 773, 775, 783, 785, 787, 793, 795, 797, 803, 805, 807, 809, 811, 821, 823, 825, 831, 833, 835, 837, 839, 841, 843, 849, 851, 853, 867, 869, 875, 877, 879, 881, 883, 895, 901, 903, 909, 911, 913, 919, 921, 927, 929, 931, 937, 943, 945, 951, 953, 955, 961, 963, 969, 971, 973, 975, 981, 983, 985, 987, 999, 1001, 1003, 1005, 1007, 1013, 1015, 1017, 1019, 1021, 1027, 1029, 1035, 1037, 1039, 1041, 1043, 1049, 1058, 1060, 1062, 1064, 1066, 1068, 1070, 1072, 1078, 1080, 1082, 1088, 1090, 1096, 1102, 1108, 1110, 1112, 1114, 1116, 1122, 1128, 1134, 1136, 1142, 1144, 1150, 1156, 1158, 1160, 1166, 1168, 1174, 1176, 1178, 1184, 1186, 1192, 1194, 1196, 1208, 1210, 1212, 1218, 1220, 1226, 1228, 1230, 1232, 1238, 1244, 1246, 1248, 1254, 1256, 1258, 1260, 1262, 1264, 1266, 1272, 1274, 1276, 1278, 1280, 1282, 1288, 1290, 1292, 1294, 1296, 1302, 1304, 1310, 1312, 1314, 1316, 1328, 1334, 1336, 1338, 1340, 1348, 1350, 1356, 1362, 1368, 1370, 1372, 1374, 1380, 1382, 1384, 1390, 1392, 1398, 1401, 1403, 1405, 1407, 1409, 1417, 1419, 1421, 1423, 1425, 1427, 1437, 1439, 1441, 1443, 1445, 1447, 1449, 1451, 1457, 1463, 1465, 1467, 1469, 1475, 1483, 1485, 1491, 1500, 1502, 1508, 1510, 1516, 1518, 1520, 1522, 1524, 1534, 1540, 1542, 1550, 1552, 1554, 1560, 1562, 1564, 1566, 1572, 1574, 1580, 1582, 1584, 1590, 1592, 1604, 1606, 1608, 1610, 1612, 1614, 1620, 1626, 1628, 1634, 1636, 1644, 1650, 1658, 1660, 1662, 1664, 1670, 1676, 1678, 1680, 1686, 1692, 1694, 1700, 1702, 1704, 1706, 1712, 1714, 1720, 1722, 1732, 1734, 1736, 1738, 1744, 1746, 1752, 1754, 1765, 1767, 1773, 1775, 1777, 1779, 1781, 1794, 1800, 1802, 1804, 1806, 1812, 1818, 1820, 1822, 1830, 1832, 1834, 1840, 1842, 1844, 1850, 1856, 1858, 1864, 1870, 1872, 1878, 1884, 1886, 1894, 1896, 1898, 1900, 1902, 1904, 1910, 1912, 1914, 1916, 1918, 1924, 1926, 1928, 1934, 1936, 1938, 1954, 1956, 1958, 1960, 1962, 1964, 1970, 1972, 1982, 1984, 1986, 2000, 2002, 2004, 2006, 2016, 2018, 2020, 2022, 2024, 2034, 2036, 2038, 2044, 2046, 2052, 2054, 2056, 2062, 2064, 2066, 2068, 2070, 2072, 2078, 2080, 2082, 2090, 2092, 2094, 2096, 2098, 2108, 2114, 2116, 2118, 2120, 2126, 2128, 2130, 2138, 2140, 2146, 2148, 2154, 2156, 2162, 2164, 2166, 2168, 2174, 2176, 2178, 2184, 2186, 2188, 2194, 2196, 2198, 2204, 2206, 2208, 2216, 2218, 2220, 2226, 2232, 2238, 2244, 2246, 2248, 2254, 2256, 2258, 2264, 2266, 2272, 2274, 2276, 2282, 2284, 2290, 2292, 2298, 2300, 2306, 2308, 2310, 2312, 2314, 2316, 2318, 2321, 2323, 2325, 2327, 2329, 2331, 2333, 2339, 2341, 2343, 2345, 2355, 2366, 2368, 2370, 2372, 2384, 2386, 2388, 2390, 2396, 2398, 2406, 2408, 2410, 2412, 2420, 2422, 2428, 2430, 2436, 2438, 2454, 2456, 2458, 2460, 2470, 2472, 2474, 2476, 2478, 2489, 2491, 2493, 2495, 2497, 2499, 2501, 2503, 2505, 2511, 2513, 2519, 2525, 2527, 2529, 2531, 2537, 2539, 2541, 2547, 2549, 2551, 2557, 2559, 2561, 2563, 2571, 2573, 2575, 2577, 2589, 2591, 2593, 2595, 2597, 2599, 2601, 2603, 2609, 2611, 2613, 2619, 2621, 2623, 2629, 2631, 2639, 2641, 2649, 2651, 2653, 2655, 2661, 2663, 2665, 2667, 2669, 2675, 2677, 2679, 2681, 2687, 2689, 2691, 2693, 2695, 2697, 2699, 2701, 2707, 2713, 2719, 2721, 2729, 2731, 2733, 2741, 2743, 2745, 2747, 2755, 2757, 2759, 2765, 2767, 2769, 2771, 2785, 2793, 2795, 2801, 2809, 2811, 2817, 2823, 2829, 2831, 2833, 2835, 2841, 2843, 2845, 2851, 2853, 2855, 2857, 2859, 2861, 2864, 2866, 2868, 2870, 2872, 2874, 2883, 2885, 2887, 2893, 2895, 2897, 2899, 2907, 2909, 2911, 2913, 2915, 2917, 2923, 2925, 2931, 2933, 2935, 2937, 2943, 2951, 2953, 2955, 2961, 2967, 2969, 2971, 2973, 2975, 2981, 2987, 2989, 2991, 2993, 2999, 3001, 3003, 3011, 3017, 3019, 3021, 3029, 3039, 3041, 3044, 3050, 3052, 3054, 3060, 3062, 3064, 3066, 3068, 3076, 3086, 3088, 3090, 3092, 3098, 3100, 3102, 3104, 3106, 3112, 3114, 3116, 3122, 3124, 3126, 3132, 3134, 3136, 3138, 3140, 3142, 3144, 3150, 3156, 3158, 3160, 3166, 3172, 3174, 3186, 3188, 3190, 3196, 3198, 3200, 3202, 3204, 3212, 3214, 3216, 3218, 3220, 3226, 3228, 3234, 3236, 3238, 3248, 3250, 3256, 3258, 3264, 3266, 3268, 3270, 3272, 3280, 3286, 3288, 3296, 3298, 3304, 3306, 3308, 3314, 3320, 3322, 3324, 3326, 3328, 3334, 3340, 3342, 3351, 3353, 3365, 3367, 3373, 3375, 3381, 3383, 3385, 3387, 3389, 3395, 3397, 3405, 3407, 3415, 3417, 3419, 3421, 3423, 3429, 3431, 3437, 3445, 3447, 3449, 3451, 3453, 3455, 3461, 3463, 3469, 3471, 3473, 3481, 3487, 3489, 3491, 3493, 3501, and 3503 shown in Tables 1-336. The invention provides an isolated polypeptide, wherein said polypeptide comprises the amino acid sequence encoded by a polypeptide selected from the group consisting of SEQ ID NOS: 14, 22, 24, 26, 32, 34, 36, 38, 40, 42, 44, 50, 52, 54, 60, 62, 64, 78, 80, 82, 88, 90, 96, 98, 100, 114, 116, 118, 128, 130, 132, 134, 136, 138, 140, 142, 148, 150, 156, 162, 164, 166, 168, 170, 172, 174, 176, 182, 184, 186, 188, 190, 192, 194, 196, 198, 200, 202, 208, 210, 212, 218, 220, 226, 228, 230, 232, 238, 240, 246, 254, 256, 262, 264, 266, 268, 274, 276, 278, 280, 286, 288, 290, 302, 308, 310, 312, 318, 320, 322, 328, 334, 336, 345, 347, 349, 351, 353, 355, 365, 367, 377, 379, 381, 383, 385, 387, 389, 391, 397, 409, 411, 417, 419, 427, 433, 435, 437, 439, 441, 443, 449, 460, 462, 464, 470, 472, 478, 484, 486, 492, 494, 496, 498, 504, 506, 508, 510, 512, 518, 520, 522, 524, 526, 532, 534, 536, 542, 544, 550, 556, 558, 560, 562, 564, 566, 574, 576, 578, 580, 582, 590, 592, 598, 600, 606, 608, 614, 616, 622, 628, 630, 632, 638, 644, 646, 648, 650, 652, 654, 656, 658, 669, 675, 681, 683, 689, 698, 704, 710, 712, 718, 720, 722, 728, 730, 732, 734, 740, 742, 744, 750, 752, 758, 760, 766, 768, 774, 776, 784, 786, 788, 794, 796, 798, 804, 806, 808, 810, 812, 822, 824, 826, 832, 834, 836, 838, 840, 842, 844, 850, 852, 854, 868, 870, 876, 878, 880, 882, 884, 896, 902, 904, 910, 912, 914, 920, 922, 928, 930, 932, 938, 944, 946, 952, 954, 956, 962, 964, 970, 972, 974, 976, 982, 984, 986, 988, 1000, 1002, 1004, 1006, 1008, 1014, 1016, 1018, 1020, 1022, 1028, 1030, 1036, 1038, 1040, 1042, 1044, 1050, 1059, 1061, 1063, 1065, 1067, 1069, 1071, 1073, 1079, 1081, 1083, 1089, 1091, 1097, 1103, 1109, 1111, 1113, 1115, 1117, 1123, 1129, 1135, 1137, 1143, 1145, 1151, 1157, 1159, 1161, 1167, 1169, 1175, 1177, 1179, 1185, 1187, 1193, 1195, 1197, 1209, 1211, 1213, 1219, 1221, 1227, 1229, 1231, 1233, 1239, 1245, 1247, 1249, 1255, 1257, 1259, 1261, 1263, 1265, 1267, 1273, 1275, 1277, 1279, 1281, 1283, 1289, 1291, 1293, 1295, 1297, 1303, 1305, 1311, 1313, 1315, 1317, 1329, 1335, 1337, 1339, 1341, 1349, 1351, 1357, 1363, 1369, 1371, 1373, 1375, 1381, 1383, 1385, 1391, 1393, 1399, 1402, 1404, 1406, 1408, 1410, 1418, 1420, 1422, 1424, 1426, 1428, 1438, 1440, 1442, 1444, 1446, 1448, 1450, 1452, 1458, 1464, 1466, 1468, 1470, 1476, 1484, 1486, 1492, 1501, 1503, 1509, 1511, 1517, 1519, 1521, 1523, 1525, 1535, 1541, 1543, 1551, 1553, 1555, 1561, 1563, 1565, 1567, 1573, 1575, 1581, 1583, 1585, 1591, 1593, 1605, 1607, 1609, 1611, 1613, 1615, 1621, 1627, 1629, 1635, 1637, 1645, 1651, 1659, 1661, 1663, 1665, 1671, 1677, 1679, 1681, 1687, 1693, 1695, 1701, 1703, 1705, 1707, 1713, 1715, 1721, 1723, 1733, 1735, 1737, 1739, 1745, 1747, 1753, 1755, 1766, 1768, 1774, 1776, 1778, 1780, 1782, 1795, 1801, 1803, 1805, 1807, 1813, 1819, 1821, 1823, 1831, 1833, 1835, 1841, 1843, 1845, 1851, 1857, 1859, 1865, 1871, 1873, 1879, 1885, 1887, 1895, 1897, 1899, 1901, 1903, 1905, 1911, 1913, 1915, 1917, 1919, 1925, 1927, 1929, 1935, 1937, 1939, 1955, 1957, 1959, 1961, 1963, 1965, 1971, 1973, 1983, 1985, 1987, 2001, 2003, 2005, 2007, 2017, 2019, 2021, 2023, 2025, 2035, 2037, 2039, 2045, 2047, 2053, 2055, 2057, 2063, 2065, 2067, 2069, 2071, 2073, 2079, 2081, 2083, 2091, 2093, 2095, 2097, 2099, 2109, 2115, 2117, 2119, 2121, 2127, 2129, 2131, 2139, 2141, 2147, 2149, 2155, 2157, 2163, 2165, 2167, 2169, 2175, 2177, 2179, 2185, 2187, 2189, 2195, 2197, 2199, 2205, 2207, 2209, 2217, 2219, 2221, 2227, 2233, 2239, 2245, 2247, 2249, 2255, 2257, 2259, 2265, 2267, 2273, 2275, 2277, 2283, 2285, 2291, 2293, 2299, 2301, 2307, 2309, 2311, 2313, 2315, 2317, 2319, 2322, 2324, 2326, 2328, 2330, 2332, 2334, 2340, 2342, 2344, 2346, 2356, 2367, 2369, 2371, 2373, 2385, 2387, 2389, 2391, 2397, 2399, 2407, 2409, 2411, 2413, 2421, 2423, 2429, 2431, 2437, 2439, 2455, 2457, 2459, 2461, 2471, 2473, 2475, 2477, 2479, 2490, 2492, 2494, 2496, 2498, 2500, 2502, 2504, 2506, 2512, 2514, 2520, 2526, 2528, 2530, 2532, 2538, 2540, 2542, 2548, 2550, 2552, 2558, 2560, 2562, 2564, 2572, 2574, 2576, 2578, 2590, 2592, 2594, 2596, 2598, 2600, 2602, 2604, 2610, 2612, 2614, 2620, 2622, 2624, 2630, 2632, 2640, 2642, 2650, 2652, 2654, 2656, 2662, 2664, 2666, 2668, 2670, 2676, 2678, 2680, 2682, 2688, 2690, 2692, 2694, 2696, 2698, 2700, 2702, 2708, 2714, 2720, 2722, 2730, 2732, 2734, 2742, 2744, 2746, 2748, 2756, 2758, 2760, 2766, 2768, 2770, 2772, 2786, 2794, 2796, 2802, 2810, 2812, 2818, 2824, 2830, 2832, 2834, 2836, 2842, 2844, 2846, 2852, 2854, 2856, 2858, 2860, 2862, 2865, 2867, 2869, 2871, 2873, 2875, 2884, 2886, 2888, 2894, 2896, 2898, 2900, 2908, 2910, 2912, 2914, 2916, 2918, 2924, 2926, 2932, 2934, 2936, 2938, 2944, 2952, 2954, 2956, 2962, 2968, 2970, 2972, 2974, 2976, 2982, 2988, 2990, 2992, 2994, 3000, 3002, 3004, 3012, 3018, 3020, 3022, 3030, 3040, 3042, 3045, 3051, 3053, 3055, 3061, 3063, 3065, 3067, 3069, 3077, 3087, 3089, 3091, 3093, 3099, 3101, 3103, 3105, 3107, 3113, 3115, 3117, 3123, 3125, 3127, 3133, 3135, 3137, 3139, 3141, 3143, 3145, 3151, 3157, 3159, 3161, 3167, 3173, 3175, 3187, 3189, 3191, 3197, 3199, 3201, 3203, 3205, 3213, 3215, 3217, 3219, 3221, 3227, 3229, 3235, 3237, 3239, 3249, 3251, 3257, 3259, 3265, 3267, 3269, 3271, 3273, 3281, 3287, 3289, 3297, 3299, 3305, 3307, 3309, 3315, 3321, 3323, 3325, 3327, 3329, 3335, 3341, 3343, 3352, 3354, 3366, 3368, 3374, 3376, 3382, 3384, 3386, 3388, 3390, 3396, 3398, 3406, 3408, 3416, 3418, 3420, 3422, 3424, 3430, 3432, 3438, 3446, 3448, 3450, 3452, 3454, 3456, 3462, 3464, 3470, 3472, 3474, 3482, 3488, 3490, 3492, 3494, 3502, and 3504 shown in Tables 1-336.

[0025] The invention further provides an isolated polypeptide, comprising the amino acid sequence of an epitope of the amino acid sequence of a CA polypeptide selected from the group consisting of SEQ ID NOS: 14, 22, 24, 26, 32, 34, 36, 38, 40, 42, 44, 50, 52, 54, 60, 62, 64, 78, 80, 82, 88, 90, 96, 98, 100, 114, 116, 118, 128, 130, 132, 134, 136, 138, 140, 142, 148, 150, 156, 162, 164, 166, 168, 170, 172, 174, 176, 182, 184, 186, 188, 190, 192, 194, 196, 198, 200, 202, 208, 210, 212, 218, 220, 226, 228, 230, 232, 238, 240, 246, 254, 256, 262, 264, 266, 268, 274, 276, 278, 280, 286, 288, 290, 302, 308, 310, 312, 318, 320, 322, 328, 334, 336, 345, 347, 349, 351, 353, 355, 365, 367, 377, 379, 381, 383, 385, 387, 389, 391, 397, 409, 411, 417, 419, 427, 433, 435, 437, 439, 441, 443, 449, 460, 462, 464, 470, 472, 478, 484, 486, 492, 494, 496, 498, 504, 506, 508, 510, 512, 518, 520, 522, 524, 526, 532, 534, 536, 542, 544, 550, 556, 558, 560, 562, 564, 566, 574, 576, 578, 580, 582, 590, 592, 598, 600, 606, 608, 614, 616, 622, 628, 630, 632, 638, 644, 646, 648, 650, 652, 654, 656, 658, 669, 675, 681, 683, 689, 698, 704, 710, 712, 718, 720, 722, 728, 730, 732, 734, 740, 742, 744, 750, 752, 758, 760, 766, 768, 774, 776, 784, 786, 788, 794, 796, 798, 804, 806, 808, 810, 812, 822, 824, 826, 832, 834, 836, 838, 840, 842, 844, 850, 852, 854, 868, 870, 876, 878, 880, 882, 884, 896, 902, 904, 910, 912, 914, 920, 922, 928, 930, 932, 938, 944, 946, 952, 954, 956, 962, 964, 970, 972, 974, 976, 982, 984, 986, 988, 1000, 1002, 1004, 1006, 1008, 1014, 1016, 1018, 1020, 1022, 1028, 1030, 1036, 1038, 1040, 1042, 1044, 1050, 1059, 1061, 1063, 1065, 1067, 1069, 1071, 1073, 1079, 1081, 1083, 1089, 1091, 1097, 1103, 1109, 1111, 1113, 1115, 1117, 1123, 1129, 1135, 1137, 1143, 1145, 1151, 1157, 1159, 1161, 1167, 1169, 1175, 1177, 1179, 1185, 1187, 1193, 1195, 1197, 1209, 1211, 1213, 1219, 1221, 1227, 1229, 1231, 1233, 1239, 1245, 1247, 1249, 1255, 1257, 1259, 1261, 1263, 1265, 1267, 1273, 1275, 1277, 1279, 1281, 1283, 1289, 1291, 1293, 1295, 1297, 1303, 1305, 1311, 1313, 1315, 1317, 1329, 1335, 1337, 1339, 1341, 1349, 1351, 1357, 1363, 1369, 1371, 1373, 1375, 1381, 1383, 1385, 1391, 1393, 1399, 1402, 1404, 1406, 1408, 1410, 1418, 1420, 1422, 1424, 1426, 1428, 1438, 1440, 1442, 1444, 1446, 1448, 1450, 1452, 1458, 1464, 1466, 1468, 1470, 1476, 1484, 1486, 1492, 1501, 1503, 1509, 1511, 1517, 1519, 1521, 1523, 1525, 1535, 1541, 1543, 1551, 1553, 1555, 1561, 1563, 1565, 1567, 1573, 1575, 1581, 1583, 1585, 1591, 1593, 1605, 1607, 1609, 1611, 1613, 1615, 1621, 1627, 1629, 1635, 1637, 1645, 1651, 1659, 1661, 1663, 1665, 1671, 1677, 1679, 1681, 1687, 1693, 1695, 1701, 1703, 1705, 1707, 1713, 1715, 1721, 1723, 1733, 1735, 1737, 1739, 1745, 1747, 1753, 1755, 1766, 1768, 1774, 1776, 1778, 1780, 1782, 1795, 1801, 1803, 1805, 1807, 1813, 1819, 1821, 1823, 1831, 1833, 1835, 1841, 1843, 1845, 1851, 1857, 1859, 1865, 1871, 1873, 1879, 1885, 1887, 1895, 1897, 1899, 1901, 1903, 1905, 1911, 1913, 1915, 1917, 1919, 1925, 1927, 1929, 1935, 1937, 1939, 1955, 1957, 1959, 1961, 1963, 1965, 1971, 1973, 1983, 1985, 1987, 2001, 2003, 2005, 2007, 2017, 2019, 2021, 2023, 2025, 2035, 2037, 2039, 2045, 2047, 2053, 2055, 2057, 2063, 2065, 2067, 2069, 2071, 2073, 2079, 2081, 2083, 2091, 2093, 2095, 2097, 2099, 2109, 2115, 2117, 2119, 2121, 2127, 2129, 2131, 2139, 2141, 2147, 2149, 2155, 2157, 2163, 2165, 2167, 2169, 2175, 2177, 2179, 2185, 2187, 2189, 2195, 2197, 2199, 2205, 2207, 2209, 2217, 2219, 2221, 2227, 2233, 2239, 2245, 2247, 2249, 2255, 2257, 2259, 2265, 2267, 2273, 2275, 2277, 2283, 2285, 2291, 2293, 2299, 2301, 2307, 2309, 2311, 2313, 2315, 2317, 2319, 2322, 2324, 2326, 2328, 2330, 2332, 2334, 2340, 2342, 2344, 2346, 2356, 2367, 2369, 2371, 2373, 2385, 2387, 2389, 2391, 2397, 2399, 2407, 2409, 2411, 2413, 2421, 2423, 2429, 2431, 2437, 2439, 2455, 2457, 2459, 2461, 2471, 2473, 2475, 2477, 2479, 2490, 2492, 2494, 2496, 2498, 2500, 2502, 2504, 2506, 2512, 2514, 2520, 2526, 2528, 2530, 2532, 2538, 2540, 2542, 2548, 2550, 2552, 2558, 2560, 2562, 2564, 2572, 2574, 2576, 2578, 2590, 2592, 2594, 2596, 2598, 2600, 2602, 2604, 2610, 2612, 2614, 2620, 2622, 2624, 2630, 2632, 2640, 2642, 2650, 2652, 2654, 2656, 2662, 2664, 2666, 2668, 2670, 2676, 2678, 2680, 2682, 2688, 2690, 2692, 2694, 2696, 2698, 2700, 2702, 2708, 2714, 2720, 2722, 2730, 2732, 2734, 2742, 2744, 2746, 2748, 2756, 2758, 2760, 2766, 2768, 2770, 2772, 2786, 2794, 2796, 2802, 2810, 2812, 2818, 2824, 2830, 2832, 2834, 2836, 2842, 2844, 2846, 2852, 2854, 2856, 2858, 2860, 2862, 2865, 2867, 2869, 2871, 2873, 2875, 2884, 2886, 2888, 2894, 2896, 2898, 2900, 2908, 2910, 2912, 2914, 2916, 2918, 2924, 2926, 2932, 2934, 2936, 2938, 2944, 2952, 2954, 2956, 2962, 2968, 2970, 2972, 2974, 2976, 2982, 2988, 2990, 2992, 2994, 3000, 3002, 3004, 3012, 3018, 3020, 3022, 3030, 3040, 3042, 3045, 3051, 3053, 3055, 3061, 3063, 3065, 3067, 3069, 3077, 3087, 3089, 3091, 3093, 3099, 3101, 3103, 3105, 3107, 3113, 3115, 3117, 3123, 3125, 3127, 3133, 3135, 3137, 3139, 3141, 3143, 3145, 3151, 3157, 3159, 3161, 3167, 3173, 3175, 3187, 3189, 3191, 3197, 3199, 3201, 3203, 3205, 3213, 3215, 3217, 3219, 3221, 3227, 3229, 3235, 3237, 3239, 3249, 3251, 3257, 3259, 3265, 3267, 3269, 3271, 3273, 3281, 3287, 3289, 3297, 3299, 3305, 3307, 3309, 3315, 3321, 3323, 3325, 3327, 3329, 3335, 3341, 3343, 3352, 3354, 3366, 3368, 3374, 3376, 3382, 3384, 3386, 3388, 3390, 3396, 3398, 3406, 3408, 3416, 3418, 3420, 3422, 3424, 3430, 3432, 3438, 3446, 3448, 3450, 3452, 3454, 3456, 3462, 3464, 3470, 3472, 3474, 3482, 3488, 3490, 3492, 3494, 3502, and 3504 shown in Tables 1-336, wherein the polypeptide or fragment thereof may be attached to a solid support. In one embodiment the invention provides an isolated antibody (monoclonal or polyclonal) or antigen binding fragment thereof, that binds to such a polypeptide. The isolated antibody or antigen binding fragment thereof may be attached to a solid support, or further comprises a detectable label.

[0026] In one embodiment, the invention provides a kit for diagnosing the presence of cancer in a test sample, said kit comprising at least one polynucleotide that selectively hybridizes to a CA polynucleotide sequence shown in Tables 1-336, or its complement. In another embodiment. the invention provides an electronic library comprising a CA polynucleotide, a CA polypeptide, or fragment thereof, shown in Tables 1-336.

[0027] In one embodiment, the invention provides a method of screening for anticancer activity comprising: (a) providing a cell that expresses a cancer associated (CA) gene encoded by a nucleic acid sequence selected from the group consisting of the CA sequences shown in Tables 1-336, or fragment thereof; (b) contacting a tissue sample derived from a cancer cell with an anticancer drug candidate; (c) monitoring an effect of the anticancer drug candidate on an expression of the CA polynucleotide in the tissue sample, and optionally (d) comparing the level of expression in the absence of said drug candidate to the level of expression in the presence of the drug candidate.

[0028] In one embodiment, the invention provides a method for detecting cancer associated with expression of a polypeptide in a test cell sample, comprising the steps of: (i) detecting a level of expression of at least one polypeptide selected from the group consisting of SEQ ID NOS: 14, 22, 24, 26, 32, 34, 36, 38, 40, 42, 44, 50, 52, 54, 60, 62, 64, 78, 80, 82, 88, 90, 96, 98, 100, 114, 116, 118, 128, 130, 132, 134, 136, 138, 140, 142, 148, 150, 156, 162, 164, 166, 168, 170, 172, 174, 176, 182, 184, 186, 188, 190, 192, 194, 196, 198, 200, 202, 208, 210, 212, 218, 220, 226, 228, 230, 232, 238, 240, 246, 254, 256, 262, 264, 266, 268, 274, 276, 278, 280, 286, 288, 290, 302, 308, 310, 312, 318, 320, 322, 328, 334, 336, 345, 347, 349, 351, 353, 355, 365, 367, 377, 379, 381, 383, 385, 387, 389, 391, 397, 409, 411, 417, 419, 427, 433, 435, 437, 439, 441, 443, 449, 460, 462, 464, 470, 472, 478, 484, 486, 492, 494, 496, 498, 504, 506, 508, 510, 512, 518, 520, 522, 524, 526, 532, 534, 536, 542, 544, 550, 556, 558, 560, 562, 564, 566, 574, 576, 578, 580, 582, 590, 592, 598, 600, 606, 608, 614, 616, 622, 628, 630, 632, 638, 644, 646, 648, 650, 652, 654, 656, 658, 669, 675, 681, 683, 689, 698, 704, 710, 712, 718, 720, 722, 728, 730, 732, 734, 740, 742, 744, 750, 752, 758, 760, 766, 768, 774, 776, 784, 786, 788, 794, 796, 798, 804, 806, 808, 810, 812, 822, 824, 826, 832, 834, 836, 838, 840, 842, 844, 850, 852, 854, 868, 870, 876, 878, 880, 882, 884, 896, 902, 904, 910, 912, 914, 920, 922, 928, 930, 932, 938, 944, 946, 952, 954, 956, 962, 964, 970, 972, 974, 976, 982, 984, 986, 988, 1000, 1002, 1004, 1006, 1008, 1014, 1016, 1018, 1020, 1022, 1028, 1030, 1036, 1038, 1040, 1042, 1044, 1050, 1059, 1061, 1063, 1065, 1067, 1069, 1071, 1073, 1079, 1081, 1083, 1089, 1091, 1097, 1103, 1109, 1111, 1113, 1115, 1117, 1123, 1129, 1135, 1137, 1143, 1145, 1151, 1157, 1159, 1161, 1167, 1169, 1175, 1177, 1179, 1185, 1187, 1193, 1195, 1197, 1209, 1211, 1213, 1219, 1221, 1227, 1229, 1231, 1233, 1239, 1245, 1247, 1249, 1255, 1257, 1259, 1261, 1263, 1265, 1267, 1273, 1275, 1277, 1279, 1281, 1283, 1289, 1291, 1293, 1295, 1297, 1303, 1305, 1311, 1313, 1315, 1317, 1329, 1335, 1337, 1339, 1341, 1349, 1351, 1357, 1363, 1369, 1371, 1373, 1375, 1381, 1383, 1385, 1391, 1393, 1399, 1402, 1404, 1406, 1408, 1410, 1418, 1420, 1422, 1424, 1426, 1428, 1438, 1440, 1442, 1444, 1446, 1448, 1450, 1452, 1458, 1464, 1466, 1468, 1470, 1476, 1484, 1486, 1492, 1501, 1503, 1509, 1511, 1517, 1519, 1521, 1523, 1525, 1535, 1541, 1543, 1551, 1553, 1555, 1561, 1563, 1565, 1567, 1573, 1575, 1581, 1583, 1585, 1591, 1593, 1605, 1607, 1609, 1611, 1613, 1615, 1621, 1627, 1629, 1635, 1637, 1645, 1651, 1659, 1661, 1663, 1665, 1671, 1677, 1679, 1681, 1687, 1693, 1695, 1701, 1703, 1705, 1707, 1713, 1715, 1721, 1723, 1733, 1735, 1737, 1739, 1745, 1747, 1753, 1755, 1766, 1768, 1774, 1776, 1778, 1780, 1782, 1795, 1801, 1803, 1805, 1807, 1813, 1819, 1821, 1823, 1831, 1833, 1835, 1841, 1843, 1845, 1851, 1857, 1859, 1865, 1871, 1873, 1879, 1885, 1887, 1895, 1897, 1899, 1901, 1903, 1905, 1911, 1913, 1915, 1917, 1919, 1925, 1927, 1929, 1935, 1937, 1939, 1955, 1957, 1959, 1961, 1963, 1965, 1971, 1973, 1983, 1985, 1987, 2001, 2003, 2005, 2007, 2017, 2019, 2021, 2023, 2025, 2035, 2037, 2039, 2045, 2047, 2053, 2055, 2057, 2063, 2065, 2067, 2069, 2071, 2073, 2079, 2081, 2083, 2091, 2093, 2095, 2097, 2099, 2109, 2115, 2117, 2119, 2121, 2127, 2129, 2131, 2139, 2141, 2147, 2149, 2155, 2157, 2163, 2165, 2167, 2169, 2175, 2177, 2179, 2185, 2187, 2189, 2195, 2197, 2199, 2205, 2207, 2209, 2217, 2219, 2221, 2227, 2233, 2239, 2245, 2247, 2249, 2255, 2257, 2259, 2265, 2267, 2273, 2275, 2277, 2283, 2285, 2291, 2293, 2299, 2301, 2307, 2309, 2311, 2313, 2315, 2317, 2319, 2322, 2324, 2326, 2328, 2330, 2332, 2334, 2340, 2342, 2344, 2346, 2356, 2367, 2369, 2371, 2373, 2385, 2387, 2389, 2391, 2397, 2399, 2407, 2409, 2411, 2413, 2421, 2423, 2429, 2431, 2437, 2439, 2455, 2457, 2459, 2461, 2471, 2473, 2475, 2477, 2479, 2490, 2492, 2494, 2496, 2498, 2500, 2502, 2504, 2506, 2512, 2514, 2520, 2526, 2528, 2530, 2532, 2538, 2540, 2542, 2548, 2550, 2552, 2558, 2560, 2562, 2564, 2572, 2574, 2576, 2578, 2590, 2592, 2594, 2596, 2598, 2600, 2602, 2604, 2610, 2612, 2614, 2620, 2622, 2624, 2630, 2632, 2640, 2642, 2650, 2652, 2654, 2656, 2662, 2664, 2666, 2668, 2670, 2676, 2678, 2680, 2682, 2688, 2690, 2692, 2694, 2696, 2698, 2700, 2702, 2708, 2714, 2720, 2722, 2730, 2732, 2734, 2742, 2744, 2746, 2748, 2756, 2758, 2760, 2766, 2768, 2770, 2772, 2786, 2794, 2796, 2802, 2810, 2812, 2818, 2824, 2830, 2832, 2834, 2836, 2842, 2844, 2846, 2852, 2854, 2856, 2858, 2860, 2862, 2865, 2867, 2869, 2871, 2873, 2875, 2884, 2886, 2888, 2894, 2896, 2898, 2900, 2908, 2910, 2912, 2914, 2916, 2918, 2924, 2926, 2932, 2934, 2936, 2938, 2944, 2952, 2954, 2956, 2962, 2968, 2970, 2972, 2974, 2976, 2982, 2988, 2990, 2992, 2994, 3000, 3002, 3004, 3012, 3018, 3020, 3022, 3030, 3040, 3042, 3045, 3051, 3053, 3055, 3061, 3063, 3065, 3067, 3069, 3077, 3087, 3089, 3091, 3093, 3099, 3101, 3103, 3105, 3107, 3113, 3115, 3117, 3123, 3125, 3127, 3133, 3135, 3137, 3139, 3141, 3143, 3145, 3151, 3157, 3159, 3161, 3167, 3173, 3175, 3187, 3189, 3191, 3197, 3199, 3201, 3203, 3205, 3213, 3215, 3217, 3219, 3221, 3227, 3229, 3235, 3237, 3239, 3249, 3251, 3257, 3259, 3265, 3267, 3269, 3271, 3273, 3281, 3287, 3289, 3297, 3299, 3305, 3307, 3309, 3315, 3321, 3323, 3325, 3327, 3329, 3335, 3341, 3343, 3352, 3354, 3366, 3368, 3374, 3376, 3382, 3384, 3386, 3388, 3390, 3396, 3398, 3406, 3408, 3416, 3418, 3420, 3422, 3424, 3430, 3432, 3438, 3446, 3448, 3450, 3452, 3454, 3456, 3462, 3464, 3470, 3472, 3474, 3482, 3488, 3490, 3492, 3494, 3502, and 3504 shown in Tables 1-336, or a fragment thereof; and (ii) comparing the level of expression of the polypeptide in the test sample with a level of expression of polypeptide in a normal cell sample, wherein an altered level of expression of the polypeptide in the test cell sample relative to the level of polypeptide expression in the normal cell sample is indicative of the presence of cancer in the test cell sample.

[0029] In another embodiment, the invention provides a method for detecting cancer associated with expression of a polypeptide in a test cell sample, comprising the steps of: (i) detecting a level of activity of at least one polypeptide selected from the group consisting of SEQ ID NOS: 14, 22, 24, 26, 32, 34, 36, 38, 40, 42, 44, 50, 52, 54, 60, 62, 64, 78, 80, 82, 88, 90, 96, 98, 100, 114, 116, 118, 128, 130, 132, 134, 136, 138, 140, 142, 148, 150, 156, 162, 164, 166, 168, 170, 172, 174, 176, 182, 184, 186, 188, 190, 192, 194, 196, 198, 200, 202, 208, 210, 212, 218, 220, 226, 228, 230, 232, 238, 240, 246, 254, 256, 262, 264, 266, 268, 274, 276, 278, 280, 286, 288, 290, 302, 308, 310, 312, 318, 320, 322, 328, 334, 336, 345, 347, 349, 351, 353, 355, 365, 367, 377, 379, 381, 383, 385, 387, 389, 391, 397, 409, 411, 417, 419, 427, 433, 435, 437, 439, 441, 443, 449, 460, 462, 464, 470, 472, 478, 484, 486, 492, 494, 496, 498, 504, 506, 508, 510, 512, 518, 520, 522, 524, 526, 532, 534, 536, 542, 544, 550, 556, 558, 560, 562, 564, 566, 574, 576, 578, 580, 582, 590, 592, 598, 600, 606, 608, 614, 616, 622, 628, 630, 632, 638, 644, 646, 648, 650, 652, 654, 656, 658, 669, 675, 681, 683, 689, 698, 704, 710, 712, 718, 720, 722, 728, 730, 732, 734, 740, 742, 744, 750, 752, 758, 760, 766, 768, 774, 776, 784, 786, 788, 794, 796, 798, 804, 806, 808, 810, 812, 822, 824, 826, 832, 834, 836, 838, 840, 842, 844, 850, 852, 854, 868, 870, 876, 878, 880, 882, 884, 896, 902, 904, 910, 912, 914, 920, 922, 928, 930, 932, 938, 944, 946, 952, 954, 956, 962, 964, 970, 972, 974, 976, 982, 984, 986, 988, 1000, 1002, 1004, 1006, 1008, 1014, 1016, 1018, 1020, 1022, 1028, 1030, 1036, 1038, 1040, 1042, 1044, 1050, 1059, 1061, 1063, 1065, 1067, 1069, 1071, 1073, 1079, 1081, 1083, 1089, 1091, 1097, 1103, 1109, 1111, 1113, 1115, 1117, 1123, 1129, 1135, 1137, 1143, 1145, 1151, 1157, 1159, 1161, 1167, 1169, 1175, 1177, 1179, 1185, 1187, 1193, 1195, 1197, 1209, 1211, 1213, 1219, 1221, 1227, 1229, 1231, 1233, 1239, 1245, 1247, 1249, 1255, 1257, 1259, 1261, 1263, 1265, 1267, 1273, 1275, 1277, 1279, 1281, 1283, 1289, 1291, 1293, 1295, 1297, 1303, 1305, 1311, 1313, 1315, 1317, 1329, 1335, 1337, 1339, 1341, 1349, 1351, 1357, 1363, 1369, 1371, 1373, 1375, 1381, 1383, 1385, 1391, 1393, 1399, 1402, 1404, 1406, 1408, 1410, 1418, 1420, 1422, 1424, 1426, 1428, 1438, 1440, 1442, 1444, 1446, 1448, 1450, 1452, 1458, 1464, 1466, 1468, 1470, 1476, 1484, 1486, 1492, 1501, 1503, 1509, 1511, 1517, 1519, 1521, 1523, 1525, 1535, 1541, 1543, 1551, 1553, 1555, 1561, 1563, 1565, 1567, 1573, 1575, 1581, 1583, 1585, 1591, 1593, 1605, 1607, 1609, 1611, 1613, 1615, 1621, 1627, 1629, 1635, 1637, 1645, 1651, 1659, 1661, 1663, 1665, 1671, 1677, 1679, 1681, 1687, 1693, 1695, 1701, 1703, 1705, 1707, 1713, 1715, 1721, 1723, 1733, 1735, 1737, 1739, 1745, 1747, 1753, 1755, 1766, 1768, 1774, 1776, 1778, 1780, 1782, 1795, 1801, 1803, 1805, 1807, 1813, 1819, 1821, 1823, 1831, 1833, 1835, 1841, 1843, 1845, 1851, 1857, 1859, 1865, 1871, 1873, 1879, 1885, 1887, 1895, 1897, 1899, 1901, 1903, 1905, 1911, 1913, 1915, 1917, 1919, 1925, 1927, 1929, 1935, 1937, 1939, 1955, 1957, 1959, 1961, 1963, 1965, 1971, 1973, 1983, 1985, 1987, 2001, 2003, 2005, 2007, 2017, 2019, 2021, 2023, 2025, 2035, 2037, 2039, 2045, 2047, 2053, 2055, 2057, 2063, 2065, 2067, 2069, 2071, 2073, 2079, 2081, 2083, 2091, 2093, 2095, 2097, 2099, 2109, 2115, 2117, 2119, 2121, 2127, 2129, 2131, 2139, 2141, 2147, 2149, 2155, 2157, 2163, 2165, 2167, 2169, 2175, 2177, 2179, 2185, 2187, 2189, 2195, 2197, 2199, 2205, 2207, 2209, 2217, 2219, 2221, 2227, 2233, 2239, 2245, 2247, 2249, 2255, 2257, 2259, 2265, 2267, 2273, 2275, 2277, 2283, 2285, 2291, 2293, 2299, 2301, 2307, 2309, 2311, 2313, 2315, 2317, 2319, 2322, 2324, 2326, 2328, 2330, 2332, 2334, 2340, 2342, 2344, 2346, 2356, 2367, 2369, 2371, 2373, 2385, 2387, 2389, 2391, 2397, 2399, 2407, 2409, 2411, 2413, 2421, 2423, 2429, 2431, 2437, 2439, 2455, 2457, 2459, 2461, 2471, 2473, 2475, 2477, 2479, 2490, 2492, 2494, 2496, 2498, 2500, 2502, 2504, 2506, 2512, 2514, 2520, 2526, 2528, 2530, 2532, 2538, 2540, 2542, 2548, 2550, 2552, 2558, 2560, 2562, 2564, 2572, 2574, 2576, 2578, 2590, 2592, 2594, 2596, 2598, 2600, 2602, 2604, 2610, 2612, 2614, 2620, 2622, 2624, 2630, 2632, 2640, 2642, 2650, 2652, 2654, 2656, 2662, 2664, 2666, 2668, 2670, 2676, 2678, 2680, 2682, 2688, 2690, 2692, 2694, 2696, 2698, 2700, 2702, 2708, 2714, 2720, 2722, 2730, 2732, 2734, 2742, 2744, 2746, 2748, 2756, 2758, 2760, 2766, 2768, 2770, 2772, 2786, 2794, 2796, 2802, 2810, 2812, 2818, 2824, 2830, 2832, 2834, 2836, 2842, 2844, 2846, 2852, 2854, 2856, 2858, 2860, 2862, 2865, 2867, 2869, 2871, 2873, 2875, 2884, 2886, 2888, 2894, 2896, 2898, 2900, 2908, 2910, 2912, 2914, 2916, 2918, 2924, 2926, 2932, 2934, 2936, 2938, 2944, 2952, 2954, 2956, 2962, 2968, 2970, 2972, 2974, 2976, 2982, 2988, 2990, 2992, 2994, 3000, 3002, 3004, 3012, 3018, 3020, 3022, 3030, 3040, 3042, 3045, 3051, 3053, 3055, 3061, 3063, 3065, 3067, 3069, 3077, 3087, 3089, 3091, 3093, 3099, 3101, 3103, 3105, 3107, 3113, 3115, 3117, 3123, 3125, 3127, 3133, 3135, 3137, 3139, 3141, 3143, 3145, 3151, 3157, 3159, 3161, 3167, 3173, 3175, 3187, 3189, 3191, 3197, 3199, 3201, 3203, 3205, 3213, 3215, 3217, 3219, 3221, 3227, 3229, 3235, 3237, 3239, 3249, 3251, 3257, 3259, 3265, 3267, 3269, 3271, 3273, 3281, 3287, 3289, 3297, 3299, 3305, 3307, 3309, 3315, 3321, 3323, 3325, 3327, 3329, 3335, 3341, 3343, 3352, 3354, 3366, 3368, 3374, 3376, 3382, 3384, 3386, 3388, 3390, 3396, 3398, 3406, 3408, 3416, 3418, 3420, 3422, 3424, 3430, 3432, 3438, 3446, 3448, 3450, 3452, 3454, 3456, 3462, 3464, 3470, 3472, 3474, 3482, 3488, 3490, 3492, 3494, 3502, and 3504 shown in Tables 1-336, or a fragment thereof, wherein said activity corresponds to at least one activity for the polypeptide listed in Tables 1-336; and (ii) comparing the level of activity of the polypeptide in the test sample with a level of activity of polypeptide in a normal cell sample, wherein an altered level of activity of the polypeptide in the test cell sample relative to the level of polypeptide activity in the normal cell sample is indicative of the presence of cancer in the test cell sample.

[0030] In another embodiment, the invention provides a method for detecting cancer associated with the presence of an antibody in a test serum sample, comprising the steps of: (i) detecting a level of an antibody against an antigenic polypeptide selected from the group consisting of SEQ ID NOS: 14, 22, 24, 26, 32, 34, 36, 38, 40, 42, 44, 50, 52, 54, 60, 62, 64, 78, 80, 82, 88, 90, 96, 98, 100, 114, 116, 118, 128, 130, 132, 134, 136, 138, 140, 142, 148, 150, 156, 162, 164, 166, 168, 170, 172, 174, 176, 182, 184, 186, 188, 190, 192, 194, 196, 198, 200, 202, 208, 210, 212, 218, 220, 226, 228, 230, 232, 238, 240, 246, 254, 256, 262, 264, 266, 268, 274, 276, 278, 280, 286, 288, 290, 302, 308, 310, 312, 318, 320, 322, 328, 334, 336, 345, 347, 349, 351, 353, 355, 365, 367, 377, 379, 381, 383, 385, 387, 389, 391, 397, 409, 411, 417, 419, 427, 433, 435, 437, 439, 441, 443, 449, 460, 462, 464, 470, 472, 478, 484, 486, 492, 494, 496, 498, 504, 506, 508, 510, 512, 518, 520, 522, 524, 526, 532, 534, 536, 542, 544, 550, 556, 558, 560, 562, 564, 566, 574, 576, 578, 580, 582, 590, 592, 598, 600, 606, 608, 614, 616, 622, 628, 630, 632, 638, 644, 646, 648, 650, 652, 654, 656, 658, 669, 675, 681, 683, 689, 698, 704, 710, 712, 718, 720, 722, 728, 730, 732, 734, 740, 742, 744, 750, 752, 758, 760, 766, 768, 774, 776, 784, 786, 788, 794, 796, 798, 804, 806, 808, 810, 812, 822, 824, 826, 832, 834, 836, 838, 840, 842, 844, 850, 852, 854, 868, 870, 876, 878, 880, 882, 884, 896, 902, 904, 910, 912, 914, 920, 922, 928, 930, 932, 938, 944, 946, 952, 954, 956, 962, 964, 970, 972, 974, 976, 982, 984, 986, 988, 1000, 1002, 1004, 1006, 1008, 1014, 1016, 1018, 1020, 1022, 1028, 1030, 1036, 1038, 1040, 1042, 1044, 1050, 1059, 1061, 1063, 1065, 1067, 1069, 1071, 1073, 1079, 1081, 1083, 1089, 1091, 1097, 1103, 1109, 1111, 1113, 1115, 1117, 1123, 1129, 1135, 1137, 1143, 1145, 1151, 1157, 1159, 1161, 1167, 1169, 1175, 1177, 1179, 1185, 1187, 1193, 1195, 1197, 1209, 1211, 1213, 1219, 1221, 1227, 1229, 1231, 1233, 1239, 1245, 1247, 1249, 1255, 1257, 1259, 1261, 1263, 1265, 1267, 1273, 1275, 1277, 1279, 1281, 1283, 1289, 1291, 1293, 1295, 1297, 1303, 1305, 1311, 1313, 1315, 1317, 1329, 1335, 1337, 1339, 1341, 1349, 1351, 1357, 1363, 1369, 1371, 1373, 1375, 1381, 1383, 1385, 1391, 1393, 1399, 1402, 1404, 1406, 1408, 1410, 1418, 1420, 1422, 1424, 1426, 1428, 1438, 1440, 1442, 1444, 1446, 1448, 1450, 1452, 1458, 1464, 1466, 1468, 1470, 1476, 1484, 1486, 1492, 1501, 1503, 1509, 1511, 1517, 1519, 1521, 1523, 1525, 1535, 1541, 1543, 1551, 1553, 1555, 1561, 1563, 1565, 1567, 1573, 1575, 1581, 1583, 1585, 1591, 1593, 1605, 1607, 1609, 1611, 1613, 1615, 1621, 1627, 1629, 1635, 1637, 1645, 1651, 1659, 1661, 1663, 1665, 1671, 1677, 1679, 1681, 1687, 1693, 1695, 1701, 1703, 1705, 1707, 1713, 1715, 1721, 1723, 1733, 1735, 1737, 1739, 1745, 1747, 1753, 1755, 1766, 1768, 1774, 1776, 1778, 1780, 1782, 1795, 1801, 1803, 1805, 1807, 1813, 1819, 1821, 1823, 1831, 1833, 1835, 1841, 1843, 1845, 1851, 1857, 1859, 1865, 1871, 1873, 1879, 1885, 1887, 1895, 1897, 1899, 1901, 1903, 1905, 1911, 1913, 1915, 1917, 1919, 1925, 1927, 1929, 1935, 1937, 1939, 1955, 1957, 1959, 1961, 1963, 1965, 1971, 1973, 1983, 1985, 1987, 2001, 2003, 2005, 2007, 2017, 2019, 2021, 2023, 2025, 2035, 2037, 2039, 2045, 2047, 2053, 2055, 2057, 2063, 2065, 2067, 2069, 2071, 2073, 2079, 2081, 2083, 2091, 2093, 2095, 2097, 2099, 2109, 2115, 2117, 2119, 2121, 2127, 2129, 2131, 2139, 2141, 2147, 2149, 2155, 2157, 2163, 2165, 2167, 2169, 2175, 2177, 2179, 2185, 2187, 2189, 2195, 2197, 2199, 2205, 2207, 2209, 2217, 2219, 2221, 2227, 2233, 2239, 2245, 2247, 2249, 2255, 2257, 2259, 2265, 2267, 2273, 2275, 2277, 2283, 2285, 2291, 2293, 2299, 2301, 2307, 2309, 2311, 2313, 2315, 2317, 2319, 2322, 2324, 2326, 2328, 2330, 2332, 2334, 2340, 2342, 2344, 2346, 2356, 2367, 2369, 2371, 2373, 2385, 2387, 2389, 2391, 2397, 2399, 2407, 2409, 2411, 2413, 2421, 2423, 2429, 2431, 2437, 2439, 2455, 2457, 2459, 2461, 2471, 2473, 2475, 2477, 2479, 2490, 2492, 2494, 2496, 2498, 2500, 2502, 2504, 2506, 2512, 2514, 2520, 2526, 2528, 2530, 2532, 2538, 2540, 2542, 2548, 2550, 2552, 2558, 2560, 2562, 2564, 2572, 2574, 2576, 2578, 2590, 2592, 2594, 2596, 2598, 2600, 2602, 2604, 2610, 2612, 2614, 2620, 2622, 2624, 2630, 2632, 2640, 2642, 2650, 2652, 2654, 2656, 2662, 2664, 2666, 2668, 2670, 2676, 2678, 2680, 2682, 2688, 2690, 2692, 2694, 2696, 2698, 2700, 2702, 2708, 2714, 2720, 2722, 2730, 2732, 2734, 2742, 2744, 2746, 2748, 2756, 2758, 2760, 2766, 2768, 2770, 2772, 2786, 2794, 2796, 2802, 2810, 2812, 2818, 2824, 2830, 2832, 2834, 2836, 2842, 2844, 2846, 2852, 2854, 2856, 2858, 2860, 2862, 2865, 2867, 2869, 2871, 2873, 2875, 2884, 2886, 2888, 2894, 2896, 2898, 2900, 2908, 2910, 2912, 2914, 2916, 2918, 2924, 2926, 2932, 2934, 2936, 2938, 2944, 2952, 2954, 2956, 2962, 2968, 2970, 2972, 2974, 2976, 2982, 2988, 2990, 2992, 2994, 3000, 3002, 3004, 3012, 3018, 3020, 3022, 3030, 3040, 3042, 3045, 3051, 3053, 3055, 3061, 3063, 3065, 3067, 3069, 3077, 3087, 3089, 3091, 3093, 3099, 3101, 3103, 3105, 3107, 3113, 3115, 3117, 3123, 3125, 3127, 3133, 3135, 3137, 3139, 3141, 3143, 3145, 3151, 3157, 3159, 3161, 3167, 3173, 3175, 3187, 3189, 3191, 3197, 3199, 3201, 3203, 3205, 3213, 3215, 3217, 3219, 3221, 3227, 3229, 3235, 3237, 3239, 3249, 3251, 3257, 3259, 3265, 3267, 3269, 3271, 3273, 3281, 3287, 3289, 3297, 3299, 3305, 3307, 3309, 3315, 3321, 3323, 3325, 3327, 3329, 3335, 3341, 3343, 3352, 3354, 3366, 3368, 3374, 3376, 3382, 3384, 3386, 3388, 3390, 3396, 3398, 3406, 3408, 3416, 3418, 3420, 3422, 3424, 3430, 3432, 3438, 3446, 3448, 3450, 3452, 3454, 3456, 3462, 3464, 3470, 3472, 3474, 3482, 3488, 3490, 3492, 3494, 3502, and 3504 shown in Tables 1-336, or antigenic fragment thereof, and (ii) comparing said level of said antibody in the test sample with a level of said antibody in the control sample, wherein an altered level of antibody in said test sample relative to the level of antibody in the control sample is indicative of the presence of cancer in the test serum sample.

[0031] The invention provides a method for screening for a bioactive agent capable of modulating the activity of a CA protein (CAP), wherein said CAP is encoded by a nucleic acid comprising a nucleic acid sequence selected from the group consisting of the polynucleotide sequences SEQ ID NOS: 13, 21, 23, 25, 31, 33, 35, 37, 39, 41, 43, 49, 51, 53, 59, 61, 63, 77, 79, 81, 87, 89, 95, 97, 99, 113, 115, 117, 127, 129, 131, 133, 135, 137, 139, 141, 147, 149, 155, 161, 163, 165, 167, 169, 171, 173, 175, 181, 183, 185, 187, 189, 191, 193, 195, 197, 199, 201, 207, 209, 211, 217, 219, 225, 227, 229, 231, 237, 239, 245, 253, 255, 261, 263, 265, 267, 273, 275, 277, 279, 285, 287, 289, 301, 307, 309, 311, 317, 319, 321, 327, 333, 335, 344, 346, 348, 350, 352, 354, 364, 366, 376, 378, 380, 382, 384, 386, 388, 390, 396, 408, 410, 416, 418, 426, 432, 434, 436, 438, 440, 442, 448, 459, 461, 463, 469, 471, 477, 483, 485, 491, 493, 495, 497, 503, 505, 507, 509, 511, 517, 519, 521, 523, 525, 531, 533, 535, 541, 543, 549, 555, 557, 559, 561, 563, 565, 573, 575, 577, 579, 581, 589, 591, 597, 599, 605, 607, 613, 615, 621, 627, 629, 631, 637, 643, 645, 647, 649, 651, 653, 655, 657, 668, 674, 680, 682, 688, 697, 703, 709, 711, 717, 719, 721, 727, 729, 731, 733, 739, 741, 743, 749, 751, 757, 759, 765, 767, 773, 775, 783, 785, 787, 793, 795, 797, 803, 805, 807, 809, 811, 821, 823, 825, 831, 833, 835, 837, 839, 841, 843, 849, 851, 853, 867, 869, 875, 877, 879, 881, 883, 895, 901, 903, 909, 911, 913, 919, 921, 927, 929, 931, 937, 943, 945, 951, 953, 955, 961, 963, 969, 971, 973, 975, 981, 983, 985, 987, 999, 1001, 1003, 1005, 1007, 1013, 1015, 1017, 1019, 1021, 1027, 1029, 1035, 1037, 1039, 1041, 1043, 1049, 1058, 1060, 1062, 1064, 1066, 1068, 1070, 1072, 1078, 1080, 1082, 1088, 1090, 1096, 1102, 1108, 1110, 1112, 1114, 1116, 1122, 1128, 1134, 1136, 1142, 1144, 1150, 1156, 1158, 1160, 1166, 1168, 1174, 1176, 1178, 1184, 1186, 1192, 1194, 1196, 1208, 1210, 1212, 1218, 1220, 1226, 1228, 1230, 1232, 1238, 1244, 1246, 1248, 1254, 1256, 1258, 1260, 1262, 1264, 1266, 1272, 1274, 1276, 1278, 1280, 1282, 1288, 1290, 1292, 1294, 1296, 1302, 1304, 1310, 1312, 1314, 1316, 1328, 1334, 1336, 1338, 1340, 1348, 1350, 1356, 1362, 1368, 1370, 1372, 1374, 1380, 1382, 1384, 1390, 1392, 1398, 1401, 1403, 1405, 1407, 1409, 1417, 1419, 1421, 1423, 1425, 1427, 1437, 1439, 1441, 1443, 1445, 1447, 1449, 1451, 1457, 1463, 1465, 1467, 1469, 1475, 1483, 1485, 1491, 1500, 1502, 1508, 1510, 1516, 1518, 1520, 1522, 1524, 1534, 1540, 1542, 1550, 1552, 1554, 1560, 1562, 1564, 1566, 1572, 1574, 1580, 1582, 1584, 1590, 1592, 1604, 1606, 1608, 1610, 1612, 1614, 1620, 1626, 1628, 1634, 1636, 1644, 1650, 1658, 1660, 1662, 1664, 1670, 1676, 1678, 1680, 1686, 1692, 1694, 1700, 1702, 1704, 1706, 1712, 1714, 1720, 1722, 1732, 1734, 1736, 1738, 1744, 1746, 1752, 1754, 1765, 1767, 1773, 1775, 1777, 1779, 1781, 1794, 1800, 1802, 1804, 1806, 1812, 1818, 1820, 1822, 1830, 1832, 1834, 1840, 1842, 1844, 1850, 1856, 1858, 1864, 1870, 1872, 1878, 1884, 1886, 1894, 1896, 1898, 1900, 1902, 1904, 1910, 1912, 1914, 1916, 1918, 1924, 1926, 1928, 1934, 1936, 1938, 1954, 1956, 1958, 1960, 1962, 1964, 1970, 1972, 1982, 1984, 1986, 2000, 2002, 2004, 2006, 2016, 2018, 2020, 2022, 2024, 2034, 2036, 2038, 2044, 2046, 2052, 2054, 2056, 2062, 2064, 2066, 2068, 2070, 2072, 2078, 2080, 2082, 2090, 2092, 2094, 2096, 2098, 2108, 2114, 2116, 2118, 2120, 2126, 2128, 2130, 2138, 2140, 2146, 2148, 2154, 2156, 2162, 2164, 2166, 2168, 2174, 2176, 2178, 2184, 2186, 2188, 2194, 2196, 2198, 2204, 2206, 2208, 2216, 2218, 2220, 2226, 2232, 2238, 2244, 2246, 2248, 2254, 2256, 2258, 2264, 2266, 2272, 2274, 2276, 2282, 2284, 2290, 2292, 2298, 2300, 2306, 2308, 2310, 2312, 2314, 2316, 2318, 2321, 2323, 2325, 2327, 2329, 2331, 2333, 2339, 2341, 2343, 2345, 2355, 2366, 2368, 2370, 2372, 2384, 2386, 2388, 2390, 2396, 2398, 2406, 2408, 2410, 2412, 2420, 2422, 2428, 2430, 2436, 2438, 2454, 2456, 2458, 2460, 2470, 2472, 2474, 2476, 2478, 2489, 2491, 2493, 2495, 2497, 2499, 2501, 2503, 2505, 2511, 2513, 2519, 2525, 2527, 2529, 2531, 2537, 2539, 2541, 2547, 2549, 2551, 2557, 2559, 2561, 2563, 2571, 2573, 2575, 2577, 2589, 2591, 2593, 2595, 2597, 2599, 2601, 2603, 2609, 2611, 2613, 2619, 2621, 2623, 2629, 2631, 2639, 2641, 2649, 2651, 2653, 2655, 2661, 2663, 2665, 2667, 2669, 2675, 2677, 2679, 2681, 2687, 2689, 2691, 2693, 2695, 2697, 2699, 2701, 2707, 2713, 2719, 2721, 2729, 2731, 2733, 2741, 2743, 2745, 2747, 2755, 2757, 2759, 2765, 2767, 2769, 2771, 2785, 2793, 2795, 2801, 2809, 2811, 2817, 2823, 2829, 2831, 2833, 2835, 2841, 2843, 2845, 2851, 2853, 2855, 2857, 2859, 2861, 2864, 2866, 2868, 2870, 2872, 2874, 2883, 2885, 2887, 2893, 2895, 2897, 2899, 2907, 2909, 2911, 2913, 2915, 2917, 2923, 2925, 2931, 2933, 2935, 2937, 2943, 2951, 2953, 2955, 2961, 2967, 2969, 2971, 2973, 2975, 2981, 2987, 2989, 2991, 2993, 2999, 3001, 3003, 3011, 3017, 3019, 3021, 3029, 3039, 3041, 3044, 3050, 3052, 3054, 3060, 3062, 3064, 3066, 3068, 3076, 3086, 3088, 3090, 3092, 3098, 3100, 3102, 3104, 3106, 3112, 3114, 3116, 3122, 3124, 3126, 3132, 3134, 3136, 3138, 3140, 3142, 3144, 3150, 3156, 3158, 3160, 3166, 3172, 3174, 3186, 3188, 3190, 3196, 3198, 3200, 3202, 3204, 3212, 3214, 3216, 3218, 3220, 3226, 3228, 3234, 3236, 3238, 3248, 3250, 3256, 3258, 3264, 3266, 3268, 3270, 3272, 3280, 3286, 3288, 3296, 3298, 3304, 3306, 3308, 3314, 3320, 3322, 3324, 3326, 3328, 3334, 3340, 3342, 3351, 3353, 3365, 3367, 3373, 3375, 3381, 3383, 3385, 3387, 3389, 3395, 3397, 3405, 3407, 3415, 3417, 3419, 3421, 3423, 3429, 3431, 3437, 3445, 3447, 3449, 3451, 3453, 3455, 3461, 3463, 3469, 3471, 3473, 3481, 3487, 3489, 3491, 3493, 3501, and 3503 shown in Tables 1-336, said method comprising: a) combining said CAP and a candidate bioactive agent; and b) determining the effect of the candidate agent on the bioactivity of said CAP. According to the method the bioactive agent: affects the expression of the CA protein (CAP); affects the activity of the CA protein (CAP), wherein such activity is selected from the activities listed in Tables 1-336.

[0032] In one embodiment, the invention provides a method for diagnosing cancer comprising: a) determining the expression of one or more genes comprising a nucleic acid sequence selected from the group consisting of the human genomic and mRNA sequences outlined in Tables 1-336, in a first tissue type of a first individual; and b) comparing said expression of said gene(s) from a second normal tissue type from said first individual or a second unaffected individual; wherein a difference in said expression indicates that the first individual has cancer.

[0033] In another embodiment the invention provides a method for treating cancers comprising administering to a patient a bioactive agent modulating the activity of a CA protein (CAP), wherein said CAP is encoded by a nucleic acid comprising a nucleic acid sequence selected from the group consisting of the human nucleic acid sequences in Tables 1-336 and further wherein the bioactive agent binds to the CA protein; wherein the CA protein comprises SEQ ID NOS: 14, 22, 24, 26, 32, 34, 36, 38, 40, 42, 44, 50, 52, 54, 60, 62, 64, 78, 80, 82, 88, 90, 96, 98, 100, 114, 116, 118, 128, 130, 132, 134, 136, 138, 140, 142, 148, 150, 156, 162, 164, 166, 168, 170, 172, 174, 176, 182, 184, 186, 188, 190, 192, 194, 196, 198, 200, 202, 208, 210, 212, 218, 220, 226, 228, 230, 232, 238, 240, 246, 254, 256, 262, 264, 266, 268, 274, 276, 278, 280, 286, 288, 290, 302, 308, 310, 312, 318, 320, 322, 328, 334, 336, 345, 347, 349, 351, 353, 355, 365, 367, 377, 379, 381, 383, 385, 387, 389, 391, 397, 409, 411, 417, 419, 427, 433, 435, 437, 439, 441, 443, 449, 460, 462, 464, 470, 472, 478, 484, 486, 492, 494, 496, 498, 504, 506, 508, 510, 512, 518, 520, 522, 524, 526, 532, 534, 536, 542, 544, 550, 556, 558, 560, 562, 564, 566, 574, 576, 578, 580, 582, 590, 592, 598, 600, 606, 608, 614, 616, 622, 628, 630, 632, 638, 644, 646, 648, 650, 652, 654, 656, 658, 669, 675, 681, 683, 689, 698, 704, 710, 712, 718, 720, 722, 728, 730, 732, 734, 740, 742, 744, 750, 752, 758, 760, 766, 768, 774, 776, 784, 786, 788, 794, 796, 798, 804, 806, 808, 810, 812, 822, 824, 826, 832, 834, 836, 838, 840, 842, 844, 850, 852, 854, 868, 870, 876, 878, 880, 882, 884, 896, 902, 904, 910, 912, 914, 920, 922, 928, 930, 932, 938, 944, 946, 952, 954, 956, 962, 964, 970, 972, 974, 976, 982, 984, 986, 988, 1000, 1002, 1004, 1006, 1008, 1014, 1016, 1018, 1020, 1022, 1028, 1030, 1036, 1038, 1040, 1042, 1044, 1050, 1059, 1061, 1063, 1065, 1067, 1069, 1071, 1073, 1079, 1081, 1083, 1089, 1091, 1097, 1103, 1109, 1111, 1113, 1115, 1117, 1123, 1129, 1135, 1137, 1143, 1145, 1151, 1157, 1159, 1161, 1167, 1169, 1175, 1177, 1179, 1185, 1187, 1193, 1195, 1197, 1209, 1211, 1213, 1219, 1221, 1227, 1229, 1231, 1233, 1239, 1245, 1247, 1249, 1255, 1257, 1259, 1261, 1263, 1265, 1267, 1273, 1275, 1277, 1279, 1281, 1283, 1289, 1291, 1293, 1295, 1297, 1303, 1305, 1311, 1313, 1315, 1317, 1329, 1335, 1337, 1339, 1341, 1349, 1351, 1357, 1363, 1369, 1371, 1373, 1375, 1381, 1383, 1385, 1391, 1393, 1399, 1402, 1404, 1406, 1408, 1410, 1418, 1420, 1422, 1424, 1426, 1428, 1438, 1440, 1442, 1444, 1446, 1448, 1450, 1452, 1458, 1464, 1466, 1468, 1470, 1476, 1484, 1486, 1492, 1501, 1503, 1509, 1511, 1517, 1519, 1521, 1523, 1525, 1535, 1541, 1543, 1551, 1553, 1555, 1561, 1563, 1565, 1567, 1573, 1575, 1581, 1583, 1585, 1591, 1593, 1605, 1607, 1609, 1611, 1613, 1615, 1621, 1627, 1629, 1635, 1637, 1645, 1651, 1659, 1661, 1663, 1665, 1671, 1677, 1679, 1681, 1687, 1693, 1695, 1701, 1703, 1705, 1707, 1713, 1715, 1721, 1723, 1733, 1735, 1737, 1739, 1745, 1747, 1753, 1755, 1766, 1768, 1774, 1776, 1778, 1780, 1782, 1795, 1801, 1803, 1805, 1807, 1813, 1819, 1821, 1823, 1831, 1833, 1835, 1841, 1843, 1845, 1851, 1857, 1859, 1865, 1871, 1873, 1879, 1885, 1887, 1895, 1897, 1899, 1901, 1903, 1905, 1911, 1913, 1915, 1917, 1919, 1925, 1927, 1929, 1935, 1937, 1939, 1955, 1957, 1959, 1961, 1963, 1965, 1971, 1973, 1983, 1985, 1987, 2001, 2003, 2005, 2007, 2017, 2019, 2021, 2023, 2025, 2035, 2037, 2039, 2045, 2047, 2053, 2055, 2057, 2063, 2065, 2067, 2069, 2071, 2073, 2079, 2081, 2083, 2091, 2093, 2095, 2097, 2099, 2109, 2115, 2117, 2119, 2121, 2127, 2129, 2131, 2139, 2141, 2147, 2149, 2155, 2157, 2163, 2165, 2167, 2169, 2175, 2177, 2179, 2185, 2187, 2189, 2195, 2197, 2199, 2205, 2207, 2209, 2217, 2219, 2221, 2227, 2233, 2239, 2245, 2247, 2249, 2255, 2257, 2259, 2265, 2267, 2273, 2275, 2277, 2283, 2285, 2291, 2293, 2299, 2301, 2307, 2309, 2311, 2313, 2315, 2317, 2319, 2322, 2324, 2326, 2328, 2330, 2332, 2334, 2340, 2342, 2344, 2346, 2356, 2367, 2369, 2371, 2373, 2385, 2387, 2389, 2391, 2397, 2399, 2407, 2409, 2411, 2413, 2421, 2423, 2429, 2431, 2437, 2439, 2455, 2457, 2459, 2461, 2471, 2473, 2475, 2477, 2479, 2490, 2492, 2494, 2496, 2498, 2500, 2502, 2504, 2506, 2512, 2514, 2520, 2526, 2528, 2530, 2532, 2538, 2540, 2542, 2548, 2550, 2552, 2558, 2560, 2562, 2564, 2572, 2574, 2576, 2578, 2590, 2592, 2594, 2596, 2598, 2600, 2602, 2604, 2610, 2612, 2614, 2620, 2622, 2624, 2630, 2632, 2640, 2642, 2650, 2652, 2654, 2656, 2662, 2664, 2666, 2668, 2670, 2676, 2678, 2680, 2682, 2688, 2690, 2692, 2694, 2696, 2698, 2700, 2702, 2708, 2714, 2720, 2722, 2730, 2732, 2734, 2742, 2744, 2746, 2748, 2756, 2758, 2760, 2766, 2768, 2770, 2772, 2786, 2794, 2796, 2802, 2810, 2812, 2818, 2824, 2830, 2832, 2834, 2836, 2842, 2844, 2846, 2852, 2854, 2856, 2858, 2860, 2862, 2865, 2867, 2869, 2871, 2873, 2875, 2884, 2886, 2888, 2894, 2896, 2898, 2900, 2908, 2910, 2912, 2914, 2916, 2918, 2924, 2926, 2932, 2934, 2936, 2938, 2944, 2952, 2954, 2956, 2962, 2968, 2970, 2972, 2974, 2976, 2982, 2988, 2990, 2992, 2994, 3000, 3002, 3004, 3012, 3018, 3020, 3022, 3030, 3040, 3042, 3045, 3051, 3053, 3055, 3061, 3063, 3065, 3067, 3069, 3077, 3087, 3089, 3091, 3093, 3099, 3101, 3103, 3105, 3107, 3113, 3115, 3117, 3123, 3125, 3127, 3133, 3135, 3137, 3139, 3141, 3143, 3145, 3151, 3157, 3159, 3161, 3167, 3173, 3175, 3187, 3189, 3191, 3197, 3199, 3201, 3203, 3205, 3213, 3215, 3217, 3219, 3221, 3227, 3229, 3235, 3237, 3239, 3249, 3251, 3257, 3259, 3265, 3267, 3269, 3271, 3273, 3281, 3287, 3289, 3297, 3299, 3305, 3307, 3309, 3315, 3321, 3323, 3325, 3327, 3329, 3335, 3341, 3343, 3352, 3354, 3366, 3368, 3374, 3376, 3382, 3384, 3386, 3388, 3390, 3396, 3398, 3406, 3408, 3416, 3418, 3420, 3422, 3424, 3430, 3432, 3438, 3446, 3448, 3450, 3452, 3454, 3456, 3462, 3464, 3470, 3472, 3474, 3482, 3488, 3490, 3492, 3494, 3502, and 3504 shown in Tables 1-336 and has an activity selected from the group consisting of: G-protein coupled receptor, nucleotide binding, nucleic acid binding, calcium binding protein, apoptosis, cell cycle regulator, chromatin protein. transcription factor, transport protein, signal transduction, nuclear receptor, growth factor, protein kinase, protein phosphorylase, peptidase, electron transport, thioredoxin, semaphorin, signaling, and motility as shown in Tables 1-336.

[0034] The invention also provides a method for detecting a presence or an absence of cancer cells in an individual, the method comprising: contacting cells from the individual with the antibody according to the invention; and detecting a complex of a CAP from the cancer cells and the antibody, wherein detection of the complex correlates with the presence of cancer cells in the individual. In one embodiment the invention provides a method for inhibiting growth of cancer cells in an individual, the method comprising: administering to the individual an effective amount of a pharmaceutical composition according to the invention. In another embodiment the invention provides a method for delivering a therapeutic agent to cancer cells in an individual, the method comprising: administering to the individual an effective amount of a pharmaceutical composition according to according to the invention.

[0035] Novel sequences associated with cancer are also provided herein. Other aspects of the invention will become apparent to the skilled artisan by the following description of the invention.

### BRIEF DESCRIPTION OF THE FIGURES

[0036] FIG. 1 depicts PCR amplification of host-provirus junction fragments.

[0037] FIG. 2 shows an example of average threshold cycle (C_{T}) values for a housekeeper gene and target gene.

[0038] FIG. 3 shows an example of the calculated difference (ΔΔC_{T}) between the C_{T} values of target and housekeeper genes (ΔC_{T}) for various samples.

[0039] FIG. 4 shows the ΔΔC_{T} and comparative expression level for each sample from FIG. 3.

### DETAILED DESCRIPTION OF PREFERRED EMBODIMENTS

[0040] The present invention is directed to a number of sequences associated with cancers, especially lymphoma, breast cancer or prostate cancer. The relatively tight linkage between clonally-integrated proviruses and protooncogenes forms “provirus tagging”, in which slow-transforming retroviruses that act by an insertion mutation mechanism are used to isolate protooncogenes. In some models, uninfected animals have low cancer rates, and infected animals have high cancer rates. It is known that many of the retroviruses involved do not carry transduced host protooncogenes or pathogenic trans-acting viral genes, and thus the cancer incidence must therefore be a direct consequence of proviral integration effects into host protooncogenes. Since proviral integration is random, rare integrants will “activate” host protooncogenes that provide a selective growth advantage, and these rare events result in new proviruses at clonal stoichiometries in tumors. In contrast to mutations caused by chemicals, radiation, or spontaneous errors, proto-oncogene insertion mutations can be easily located by virtue of the fact that a convenient-sized genetic marker of known sequence (the provirus) is present at the site of mutation. Host sequences that flank clonally integrated proviruses can be cloned using a variety of strategies. Once these sequences are in hand, the tagged protooncogenes can be subsequently identified. The presence of provirus at the same locus in two or more independent tumors is prima facie evidence that a proto-oncogene is present at or very near the provirus integration sites. This is because the genome is too large for random integrations to result in observable clustering. Any clustering that is detected is unequivocal evidence for biological selection (i.e. the tumor phenotype). Moreover, the pattern of proviral integrants (including orientations) provides compelling positional information that makes localization of the target gene at each cluster relatively simple. The three mammalian retroviruses that are known to cause cancer by an insertion mutation mechanism are FeLV (leukemia/lymphoma in cats), MLV (leukemia/lymphoma in mice and rats), and MMTV (mammary cancer in mice).

[0041] Thus, the use of oncogenic retroviruses, whose sequences insert into the genome of the host organism resulting in cancer, allows the identification of host sequences involved in cancer. These sequences may then be used in a number of different ways, including diagnosis, prognosis, screening for modulators (including both agonists and antagonists), antibody generation (for immunotherapy and imaging), etc. However, as will be appreciated by those in the art, oncogenes that are identified in one type of cancer such as lymphoma or leukemia have a strong likelihood of being involved in other types of cancers as well. Thus, while the sequences outlined herein are initially identified as correlated with lymphoma, they can also be found in other types of cancers as well, outlined below.

### DEFINITIONS

[0042] Accordingly, the present invention provides nucleic acid and protein sequences that are associated with cancer, herein termed “cancer associated” or “CA” sequences. In one embodiment, the present invention provides nucleic acid and protein sequences that are associated with cancers that originate in lymphatic tissue, herein termed “lymphoma associated,” “leukemia associated” or “LA” sequences. In another embodiment, the present invention provides nucleic acid and protein sequences that are associated with carcinomas which originate in breast tissue, herein termed “breast cancer associated” or “BC” sequences.

[0043] Suitable cancers that can be diagnosed or screened for using the methods of the present invention include cancers classified by site or by histological type. Cancers classified by site include cancer of the oral cavity and pharynx (lip, tongue, salivary gland, floor of mouth, gum and other mouth, nasopharynx, tonsil, oropharynx, hypopharynx, other oral/pharynx); cancers of the digestive system (esophagus; stomach; small intestine; colon and rectum; anus, anal canal, and anorectum; liver; intrahepatic bile duct; gallbladder; other biliary; pancreas; retroperitoneum; peritoneum, omentum, and mesentery; other digestive); cancers of the respiratory system (nasal cavity, middle ear, and sinuses; larynx; lung and bronchus; pleura; trachea, mediastinum, and other respiratory); cancers of the mesothelioma; bones and joints; and soft tissue, including heart; skin cancers, including melanomas and other non-epithelial skin cancers; Kaposi's sarcoma and breast cancer; cancer of the female genital system (cervix uteri; corpus uteri; uterus, nos; ovary; vagina; vulva; and other female genital); cancers of the male genital system (prostate gland; testis; penis; and other male genital); cancers of the urinary system (urinary bladder; kidney and renal pelvis; ureter; and other urinary); cancers of the eye and orbit; cancers of the brain and nervous system (brain; and other nervous system); cancers of the endocrine system (thyroid gland and other endocrine, including thymus); lymphomas (Hodgkin's disease and non-Hodgkin's lymphoma), multiple myeloma, and leukemias (lymphocytic leukemia; myeloid leukemia; monocytic leukemia; and other leukemias).

[0044] Other cancers, classified by histological type, that may be associated with the sequences of the invention include, but are not limited to, Neoplasm, malignant; Carcinoma, NOS; Carcinoma, undifferentiated, NOS; Giant and spindle cell carcinoma; Small cell carcinoma, NOS; Papillary carcinoma, NOS; Squamous cell carcinoma, NOS; Lymphoepithelial carcinoma; Basal cell carcinoma, NOS; Pilomatrix carcinoma; Transitional cell carcinoma, NOS; Papillary transitional cell carcinoma; Adenocarcinoma, NOS; Gastrinoma, malignant; Cholangiocarcinoma; Hepatocellular carcinoma, NOS; Combined hepatocellular carcinoma and cholangiocarcinoma; Trabecular adenocarcinoma; Adenoid cystic carcinoma; Adenocarcinoma in adenomatous polyp; Adenocarcinoma, familial polyposis coli; Solid carcinoma, NOS; Carcinoid tumor, malignant; Bronchiolo-alveolar adenocarcinoma; Papillary adenocarcinoma, NOS; Chromophobe carcinoma; Acidophil carcinoma; Oxyphilic adenocarcinoma; Basophil carcinoma; Clear cell adenocarcinoma, NOS; Granular cell carcinoma; Follicular adenocarcinoma, NOS; Papillary and follicular adenocarcinoma; Nonencapsulating sclerosing carcinoma; Adrenal cortical carcinoma; Endometroid carcinoma; Skin appendage carcinoma; Apocrine adenocarcinoma; Sebaceous adenocarcinoma; Ceruminous adenocarcinoma; Mucoepidermoid carcinoma; Cystadenocarcinoma, NOS; Papillary cystadenocarcinoma, NOS; Papillary serous cystadenocarcinoma; Mucinous cystadenocarcinoma, NOS; Mucinous adenocarcinoma; Signet ring cell carcinoma; Infiltrating duct carcinoma; Medullary carcinoma, NOS; Lobular carcinoma; Inflammatory carcinoma; Paget's disease, mammary; Acinar cell carcinoma; Adenosquamous carcinoma; Adenocarcinoma w/squamous metaplasia; Thymoma, malignant; Ovarian stromal tumor, malignant; Thecoma, malignant; Granulosa cell tumor, malignant; Androblastoma, malignant; Sertoli cell carcinoma; Leydig cell tumor, malignant; Lipid cell tumor, malignant; Paraganglioma, malignant; Extra-mammary paraganglioma, malignant; Pheochromocytoma; Glomangiosarcoma; Malignant melanoma, NOS; Amelanotic melanoma; Superficial spreading melanoma; Malig melanoma in giant pigmented nevus; Epithelioid cell melanoma; Blue nevus, malignant; Sarcoma, NOS; Fibrosarcoma, NOS; Fibrous histiocytoma, malignant; Myxosarcoma; Liposarcoma, NOS; Leiomyosarcoma, NOS; Rhabdomyosarcoma, NOS; Embryonal rhabdomyosarcoma; Alveolar rhabdomyosarcoma; Stromal sarcoma, NOS; Mixed tumor, malignant, NOS; Mullerian mixed tumor; Nephroblastoma; Hepatoblastoma; Carcinosarcoma, NOS; Mesenchymoma, malignant; Brenner tumor, malignant; Phyllodes tumor, malignant; Synovial sarcoma, NOS; Mesothelioma, malignant; Dysgerminoma; Embryonal carcinoma, NOS; Teratoma, malignant, NOS; Struma ovarii, malignant; Choriocarcinoma; Mesonephroma, malignant; Hemangiosarcoma; Hemangioendothelioma, malignant; Kaposi's sarcoma; Hemangiopericytoma, malignant; Lymphangiosarcoma; Osteosarcoma, NOS; Juxtacortical osteosarcoma; Chondrosarcoma, NOS; Chondroblastoma, malignant; Mesenchymal chondrosarcoma; Giant cell tumor of bone; Ewing's sarcoma; Odontogenic tumor, malignant; Ameloblastic odontosarcoma; Ameloblastoma, malignant; Ameloblastic fibrosarcoma; Pinealoma, malignant; Chordoma; Glioma, malignant; Ependymoma, NOS; Astrocytoma, NOS; Protoplasmic astrocytoma; Fibrillary astrocytoma; Astroblastoma; Glioblastoma, NOS; Oligodendroglioma, NOS; Oligodendroblastoma; Primitive neuroectodermal; Cerebellar sarcoma, NOS; Ganglioneuroblastoma; Neuroblastoma, NOS; Retinoblastoma, NOS; Olfactory neurogenic tumor; Meningioma, malignant; Neurofibrosarcoma; Neurilemmoma, malignant; Granular cell tumor, malignant; Malignant lymphoma, NOS; Hodgkin's disease, NOS; Hodgkin's; paragranuloma, NOS; Malignant lymphoma, small lymphocytic; Malignant lymphoma, large cell, diffuse; Malignant lymphoma, follicular, NOS; Mycosis fungoides; Other specified non-Hodgkin's lymphomas; Malignant histiocytosis; Multiple myeloma; Mast cell sarcoma; Immunoproliferative small intestinal disease; Leukemia, NOS; Lymphoid leukemia, NOS; Plasma cell leukemia; Erythroleukemia; Lymphosarcoma cell leukemia; Myeloid leukemia, NOS; Basophilic leukemia; Eosinophilic leukemia; Monocytic leukemia, NOS; Mast cell leukemia; Megakaryoblastic leukemia; Myeloid sarcoma; and Hairy cell leukemia.

[0045] In addition, the CA genes may be involved in other diseases such as, but not limited to, diseases associated with aging or neurodegeneration.

[0046] “Association” in this context means that the nucleotide or protein sequences are either differentially expressed, activated, inactivated or altered in cancers as compared to normal tissue. As outlined below, CA sequences include those that are up-regulated (i.e. expressed at a higher level), as well as those that are down-regulated (i.e. expressed at a lower level), in cancers. CA sequences also include sequences that have been altered (i.e., truncated sequences or sequences with substitutions, deletions or insertions, including point mutations) and show either the same expression profile or an altered profile. In a preferred embodiment, the CA sequences are from humans; however, as will be appreciated by those in the art, CA sequences from other organisms may be useful in animal models of disease and drug evaluation; thus, other CA sequences are provided, from vertebrates, including mammals, including rodents (rats, mice, hamsters, guinea pigs, etc.), primates, and farm animals (including sheep, goats, pigs, cows, horses, etc). In some cases, prokaryotic CA sequences may be useful. CA sequences from other organisms may be obtained using the techniques outlined below.

[0047] CA sequences include both nucleic acid and amino acid sequences. In a preferred embodiment, the CA sequences are recombinant nucleic acids. By the term “recombinant nucleic acid” herein is meant nucleic acid, originally formed in vitro, in general, by the manipulation of nucleic acid by polymerases and endonucleases, in a form not normally found in nature. Thus a recombinant nucleic acid is also an isolated nucleic acid, in a linear form, or cloned in a vector formed in vitro by ligating DNA molecules that are not normally joined, are both considered recombinant for the purposes of this invention. It is understood that once a recombinant nucleic acid is made and reintroduced into a host cell or organism, it will replicate using the in vivo cellular machinery of the host cell rather than in vitro manipulations; however, such nucleic acids, once produced recombinantly, although subsequently replicated in vivo, are still considered recombinant or isolated for the purposes of the invention. As used herein a “polynucleotide” or “nucleic acid” is a polymeric form of nucleotides of any length, either ribonucleotides or deoxyribonucleotides. This term refers only to the primary structure of the molecule. Thus, this term includes double- and single-stranded DNA and RNA. It also includes known types of modifications, for example, labels which are known in the art, methylation, “caps”, substitution of one or more of the naturally occurring nucleotides with an analog, internucleotide modifications such as, for example, those with uncharged linkages (e.g., phosphorothioates, phosphorodithioates, etc.), those containing pendant moieties, such as, for example proteins (including e.g., nucleases, toxins, antibodies, signal peptides, poly-L-lysine, etc.), those with intercalators (e.g., acridine, psoralen, etc.), those containing chelators (e.g., metals, radioactive metals, etc.), those containing alkylators, those with modified linkages (e.g., alpha anomeric nucleic acids, etc.), as well as unmodified forms of the polynucleotide.

[0048] As used herein, a polynucleotide “derived from” a designated sequence refers to a polynucleotide sequence which is comprised of a sequence of approximately at least about 6 nucleotides, preferably at least about 8 nucleotides, more preferably at least about 10-12 nucleotides, and even more preferably at least about 15-20 nucleotides corresponding to a region of the designated nucleotide sequence. “Corresponding” means homologous to or complementary to the designated sequence. Preferably, the sequence of the region from which the polynucleotide is derived is homologous to or complementary to a sequence that is unique to a CA gene.

[0049] Similarly, a “recombinant protein” is a protein made using recombinant techniques, i.e. through the expression of a recombinant nucleic acid as depicted above. A recombinant protein is distinguished from naturally occurring protein by at least one or more characteristics. For example, the protein may be isolated or purified away from some or all of the proteins and compounds with which it is normally associated in its wild type host, and thus may be substantially pure. For example, an isolated protein is unaccompanied by at least some of the material with which it is normally associated in its natural state, preferably constituting at least about 0.5%, more preferably at least about 5% by weight of the total protein in a given sample. A substantially pure protein comprises about 50-75% by weight of the total protein, with about 80% being preferred, and about 90% being particularly preferred. The definition includes the production of a CA protein from one organism in a different organism or host cell. Alternatively, the protein may be made at a significantly higher concentration than is normally seen, through the use of an inducible promoter or high expression promoter, such that the protein is made at increased concentration levels. Alternatively, the protein may be in a form not normally found in nature, as in the addition of an epitope tag or amino acid substitutions, insertions and deletions, as discussed below.

[0050] In a preferred embodiment, the CA sequences are nucleic acids. As will be appreciated by those in the art and is more fully outlined below, CA sequences are useful in a variety of applications, including diagnostic applications, which will detect naturally occurring nucleic acids, as well as screening applications; for example, biochips comprising nucleic acid probes to the CA sequences can be generated. In the broadest sense, use of “nucleic acid,” “polynucleotide” or “oligonucleotide” or equivalents herein means at least two nucleotides covalently linked together. In some embodiments, an oligonucleotide is an oligomer of 6, 8, 10, 12, 20, 30 or up to 100 nucleotides. A “polynucleotide” or “oligonucleotide” may comprise DNA, RNA, PNA or a polymer of nucleotides linked by phosphodiester and/or any alternate bonds.

[0051] A nucleic acid of the present invention generally contains phosphodiester bonds, although in some cases, as outlined below (for example, in antisense applications or when a nucleic acid is a candidate drug agent), nucleic acid analogs may have alternate backbones, comprising, for example, phosphoramidate (Beaucage et al., Tetrahedron 49(10):1925 (1993) and references therein; Letsinger, J. Org. Chem. 35:3800 (1970); Sprinzl et al., Eur. J. Biochem. 81:579 (1977); Letsinger et al., Nucl. Acids Res. 14:3487 (1986); Sawai et al, Chem. Lett. 805 (1984), Letsinger et al., J. Am. Chem. Soc. 110:4470 (1988); and Pauwels et al., Chemica Scripta 26:141 91986)), phosphorothioate (Mag et al., Nucleic Acids Res. 19:1437 (1991); and U.S. Pat. No. 5,644,048), phosphorodithioate (Briu et al., J. Am. Chem. Soc. 111:2321 (1989), O-methylphosphoroamidite linkages (see Eckstein, Oligonucleotides and Analogues: A Practical Approach, Oxford University Press), and peptide nucleic acid backbones and linkages (see Egholm, J. Am. Chem. Soc. 114:1895 (1992); Meier et al., Chem. Int. Ed. Engl. 31:1008 (1992); Nielsen, Nature, 365:566 (1993); Carlsson et al., Nature 380:207 (1996), all of which are incorporated by reference). Other analog nucleic acids include those with positive backbones (Denpcy et al., Proc. Natl. Acad. Sci. USA 92:6097 (1995); non-ionic backbones (U.S. Pat. Nos. 5,386,023, 5,637,684, 5,602,240, 5,216,141 and 4,469,863; Kiedrowshi et al., Angew. Chem. Intl. Ed. English 30:423 (1991); Letsinger et al., J. Am. Chem. Soc. 110:4470 (1988); Letsinger et al., Nucleoside & Nucleotide 13:1597 (1994); Chapters 2 and 3, ASC Symposium Series 580, “Carbohydrate Modifications in Antisense Research”, Ed. Y. S. Sanghui and P. Dan Cook; Mesmaeker et al., Bioorganic & Medicinal Chem. Lett. 4:395 (1994); Jeffs et al., J. Biomolecular NMR 34:17 (1994); Tetrahedron Lett. 37:743 (1996)) and non-ribose backbones, including those described in U.S. Pat. Nos. 5,235,033 and 5,034,506, and Chapters 6 and 7, ASC Symposium Series 580, “Carbohydrate Modifications in Antisense Research”, Ed. Y. S. Sanghui and P. Dan Cook. Nucleic acids containing one or more carbocyclic sugars are also included within one definition of nucleic acids (see Jenkins et al., Chem. Soc. Rev. (1995) pp 169-176). Several nucleic acid analogs are described in Rawls, C & E News Jun. 2, 1997 page 35. All of these references are hereby expressly incorporated by reference. These modifications of the ribose-phosphate backbone may be done for a variety of reasons, for example to increase the stability and half-life of such molecules in physiological environments for use in anti-sense applications or as probes on a biochip.

[0052] As will be appreciated by those in the art, all of these nucleic acid analogs may find use in the present invention. In addition, mixtures of naturally occurring nucleic acids and analogs can be made; alternatively, mixtures of different nucleic acid analogs, and mixtures of naturally occurring nucleic acids and analogs may be made.

[0053] The nucleic acids may be single stranded or double stranded, as specified, or contain portions of both double stranded or single stranded sequence. As will be appreciated by those in the art, the depiction of a single strand “Watson” also defines the sequence of the other strand “Crick”; thus the sequences described herein also includes the complement of the sequence. The nucleic acid may be DNA, both genomic and cDNA, RNA, or a hybrid, where the nucleic acid contains any combination of deoxyribo- and ribo-nucleotides, and any combination of bases, including uracil, adenine, thymine, cytosine, guanine, inosine, xanthine, hypoxanthine, isocytosine, isoguanine, etc. As used herein, the term “nucleoside” includes nucleotides and nucleoside and nucleotide analogs, and modified nucleosides such as amino modified nucleosides. In addition, “nucleoside” includes non-naturally occurring analog structures. Thus for example the individual units of a peptide nucleic acid, each containing a base, are referred to herein as a nucleoside.

[0054] As used herein, the term “tag,” “sequence tag” or “primer tag sequence” refers to an oligonucleotide with specific nucleic acid sequence that serves to identify a batch of polynucleotides bearing such tags therein. Polynucleotides from the same biological source are covalently tagged with a specific sequence tag so that in subsequent analysis the polynucleotide can be identified according to its source of origin. The sequence tags also serve as primers for nucleic acid amplification reactions.

[0055] A “microarray” is a linear or two-dimensional array of preferably discrete regions, each having a defined area, formed on the surface of a solid support. The density of the discrete regions on a microarray is determined by the total numbers of target polynucleotides to be detected on the surface of a single solid phase support, preferably at least about 50/cm², more preferably at least about 100/cm², even more preferably at least about 500/cm², and still more preferably at least about 1,000/cm². As used herein, a DNA microarray is an array of oligonucleotide primers placed on a chip or other surfaces used to amplify or clone target polynucleotides. Since the position of each particular group of primers in the array is known, the identities of the target polynucleotides can be determined based on their binding to a particular position in the microarray.

[0056] A “linker” is a synthetic oligodeoxyribonucleotide that contains a restriction site. A linker may be blunt end-ligated onto the ends of DNA fragments to create restriction sites that can be used in the subsequent cloning of the fragment into a vector molecule.

[0057] The term “label” refers to a composition capable of producing a detectable signal indicative of the presence of the target polynucleotide in an assay sample. Suitable labels include radioisotopes, nucleotide chromophores, enzymes, substrates, fluorescent molecules, chemiluminescent moieties, magnetic particles, bioluminescent moieties, and the like. As such, a label is any composition detectable by spectroscopic, photochemical, biochemical, immunochemical, electrical, optical, chemical, or any other appropriate means. The term “label” is used to refer to any chemical group or moiety having a detectable physical property or any compound capable of causing a chemical group or moiety to exhibit a detectable physical property, such as an enzyme that catalyzes conversion of a substrate into a detectable product. The term “label” also encompasses compounds that inhibit the expression of a particular physical property. The label may also be a compound that is a member of a binding pair, the other member of which bears a detectable physical property.

[0058] The term “support” refers to conventional supports such as beads, particles, dipsticks, fibers, filters, membranes, and silane or silicate supports such as glass slides.

[0059] The term “amplify” is used in the broad sense to mean creating an amplification product which may include, for example, additional target molecules, or target-like molecules or molecules complementary to the target molecule, which molecules are created by virtue of the presence of the target molecule in the sample. In the situation where the target is a nucleic acid, an amplification product can be made enzymatically with DNA or RNA polymerases or reverse transcriptases.

[0060] As used herein, a “biological sample” refers to a sample of tissue or fluid isolated from an individual, including but not limited to, for example, blood, plasma, serum, spinal fluid, lymph fluid, skin, respiratory, intestinal and genitourinary tracts, tears, saliva, milk, cells (including but not limited to blood cells), tumors, organs, and also samples of in vitro cell culture constituents.

[0061] The term “biological sources” as used herein refers to the sources from which the target polynucleotides are derived. The source can be of any form of “sample” as described above, including but not limited to, cell, tissue or fluid. “Different biological sources” can refer to different cells/tissues/organs of the same individual, or cells/tissues/organs from different individuals of the same species, or cells/tissues/organs from different species.

Cancer-Associated Sequences

[0062] The CA sequences of the invention were initially identified by infection of mice with a retrovirus such as murine leukemia virus (MLV) resulting in lymphoma. Retroviruses have a genome that is made out of RNA. After a retrovirus infects a host cell, a double stranded DNA copy of the retrovirus genome (a “provirus”) is inserted into the genomic DNA of the host cell. The integrated provirus may affect the expression of host genes at or near the site of integration—a phenomenon known as retroviral insertional mutagenesis. Possible changes in the expression of host cell genes include: (i) increased expression of genes near the site of integration resulting from the proximity of elements in the provirus that act as transcriptional promoters and enhancers, (ii) functional inactivation of a gene caused by the integration of a provirus into the gene itself thus preventing the synthesis of a functional gene product, or (iii) expression of a mutated protein that has a different activity to the normal protein. Typically such a protein would be prematurely truncated and lack a regulatory domain near the C terminus. Such a protein might be constitutively active, or act as a dominant negative inhibitor of the normal protein. For example, retrovirus enhancers, including that of SL3-3, are known to act on genes up to approximately 200 kilobases from the insertion site. Moreover, many of these sequences are also involved in other cancers and disease states. Sequences of mouse genes according to this invention, that are identified in this manner are shown as mDxx-yyy in Tables 1-336.

[0063] A CA sequence can be initially identified by substantial nucleic acid and/or amino acid sequence homology to the CA sequences outlined herein. Such homology can be based upon the overall nucleic acid or amino acid sequence, and is generally determined as outlined below, using either homology programs or hybridization conditions.

[0064] In one embodiment, CA sequences are those that are up-regulated in cancers; that is, the expression of these genes is higher in cancer tissue as compared to normal tissue of the same differentiation stage. “Up-regulation” as used herein means increased expression by about 50%, preferably about 100%, more preferably about 150% to about 200%, with up-regulation from 300% to 1000% being preferred.

[0065] In another embodiment, CA sequences are those that are down-regulated in cancers; that is, the expression of these genes is lower in cancer tissue as compared to normal tissue of the same differentiation stage. “Down-regulation” as used herein means decreased expression by about 50%, preferably about 100%, more preferably about 150% to about 200%, with down-regulation from 300% to 1000% to no expression being preferred.

[0066] In yet another embodiment, CA sequences are those that have altered sequences but show either the same or an altered expression profile as compared to normal lymphoid tissue of the same differentiation stage. “Altered CA sequences” as used herein also refers to sequences that are truncated, contain insertions or contain point mutations.

[0067] CA proteins of the present invention may be classified as secreted proteins, transmembrane proteins or intracellular proteins. In a preferred embodiment the CA protein is an intracellular protein. Intracellular proteins may be found in the cytoplasm and/or in the nucleus. Intracellular proteins are involved in all aspects of cellular function and replication (including, for example, signaling pathways); aberrant expression of such proteins results in unregulated or dysregulated cellular processes. For example, many intracellular proteins have enzymatic activity such as protein kinase activity, protein phosphatase activity, protease activity, nucleotide cyclase activity, polymerase activity and the like. Intracellular proteins also serve as docking proteins that are involved in organizing complexes of proteins, or targeting proteins to various subcellular localizations, and are involved in maintaining the structural integrity of organelles.

[0068] An increasingly appreciated concept in characterizing intracellular proteins is the presence in the proteins of one or more motifs for which defined functions have been attributed. In addition to the highly conserved sequences found in the enzymatic domain of proteins, highly conserved sequences have been identified in proteins that are involved in protein-protein interaction. For example, Src-homology-2 (SH2) domains bind tyrosine-phosphorylated targets in a sequence dependent manner. PTB domains, which are distinct from SH2 domains, also bind tyrosine phosphorylated targets. SH3 domains bind to proline-rich targets. In addition, PH domains, tetratricopeptide repeats and WE domains to name only a few, have been shown to mediate protein-protein interactions. Some of these may also be involved in binding to phospholipids or other second messengers. As will be appreciated by one of ordinary skill in the art, these motifs can be identified on the basis of primary sequence; thus, an analysis of the sequence of proteins may provide insight into both the enzymatic potential of the molecule and/or molecules with which the protein may associate.

[0069] In a preferred embodiment, the CA sequences are transmembrane proteins. Transmembrane proteins are molecules that span the phospholipid bilayer of a cell. They may have an intracellular domain, an extracellular domain, or both. The intracellular domains of such proteins may have a number of functions including those already described for intracellular proteins. For example, the intracellular domain may have enzymatic activity and/or may serve as a binding site for additional proteins. Frequently the intracellular domain of transmembrane proteins serves both roles. For example certain receptor tyrosine kinases have both protein kinase activity and SH2 domains. In addition, autophosphorylation of tyrosines on the receptor molecule itself creates binding sites for additional SH2 domain containing proteins.

[0070] Transmembrane proteins may contain from one to many transmembrane domains. For example, receptor tyrosine kinases, certain cytokine receptors, receptor guanylyl cyclases and receptor serine/threonine protein kinases contain a single transmembrane domain. However, various other proteins including channels and adenylyl cyclases contain numerous transmembrane domains. Many important cell surface receptors are classified as “seven transmembrane domain” proteins, as they contain 7 membrane spanning regions. Important transmembrane protein receptors include, but are not limited to insulin receptor, insulin-like growth factor receptor, human growth hormone receptor, glucose transporters, transferrin receptor, epidermal growth factor receptor, low density lipoprotein receptor, leptin receptor, interleukin receptors, e.g. IL-1 receptor, IL-2 receptor, etc. CA proteins may be derived from genes that regulate apoptosis (IL-3, GM-CSF and Bcl-x) or are shown to have a role in the regulation of apoptosis.

[0071] Characteristics of transmembrane domains include approximately 20 consecutive hydrophobic amino acids that may be followed by charged amino acids. Therefore, upon analysis of the amino acid sequence of a particular protein, the localization and number of transmembrane domains within the protein may be predicted.

[0072] The extracellular domains of transmembrane proteins are diverse; however, conserved motifs are found repeatedly among various extracellular domains. Conserved structure and/or functions have been ascribed to different extracellular motifs. For example, cytokine receptors are characterized by a cluster of cysteines and a WSXWS (W=tryptophan, S=serine, X=any amino acid) motif. Immunoglobulin-like domains are highly conserved. Mucin-like domains may be involved in cell adhesion and leucine-rich repeats participate in protein-protein interactions.

[0073] Many extracellular domains are involved in binding to other molecules. In one aspect, extracellular domains are receptors. Factors that bind the receptor domain include circulating ligands, which may be peptides, proteins, or small molecules such as adenosine and the like. For example, growth factors such as EGF, FGF and PDGF are circulating growth factors that bind to their cognate receptors to initiate a variety of cellular responses. Other factors include cytokines, mitogenic factors, neurotrophic factors and the like. Extracellular domains also bind to cell-associated molecules. In this respect, they mediate cell-cell interactions. Cell-associated ligands can be tethered to the cell for example via a glycosylphosphatidylinositol (GPI) anchor, or may themselves be transmembrane proteins. Extracellular domains also associate with the extracellular matrix and contribute to the maintenance of the cell structure.

[0074] CA proteins that are transmembrane are particularly preferred in the present invention as they are good targets for immunotherapeutics, as are described herein. In addition, as outlined below, transmembrane proteins can be also useful in imaging modalities.

[0075] It will also be appreciated by those in the art that a transmembrane protein can be made soluble by removing transmembrane sequences, for example through recombinant methods. Furthermore, transmembrane proteins that have been made soluble can be made to be secreted through recombinant means by adding an appropriate signal sequence.

[0076] In a preferred embodiment, the CA proteins are secreted proteins; the secretion of which can be either constitutive or regulated. These proteins have a signal peptide or signal sequence that targets the molecule to the secretory pathway. Secreted proteins are involved in numerous physiological events; by virtue of their circulating nature, they serve to transmit signals to various other cell types. The secreted protein may function in an autocrine manner (acting on the cell that secreted the factor), a paracrine manner (acting on cells in close proximity to the cell that secreted the factor) or an endocrine manner (acting on cells at a distance). Thus secreted molecules find use in modulating or altering numerous aspects of physiology. CA proteins that are secreted proteins are particularly preferred in the present invention as they serve as good targets for diagnostic markers, for example for blood tests.

CA Sequences and Homologs

[0077] A CA sequence is initially identified by substantial nucleic acid and/or amino acid sequence homology to the CA sequences outlined herein. Such homology can be based upon the overall nucleic acid or amino acid sequence, and is generally determined as outlined below, using either homology programs or hybridization conditions.

[0078] As used herein, a nucleic acid is a “CA nucleic acid” if the overall homology of the nucleic acid sequence to one of the nucleic acids of Tables 1-336 is preferably greater than about 75%, more preferably greater than about 80%, even more preferably greater than about 85% and most preferably greater than 90%. In some embodiments the homology will be as high as about 93 to 95 or 98%. In a preferred embodiment, the sequences that are used to determine sequence identity or similarity are selected from those of the nucleic acids of Tables 1-336. In another embodiment, the sequences are naturally occurring allelic variants of the sequences of the nucleic acids of Tables 1-336. In another embodiment, the sequences are sequence variants as further described herein.

[0079] Homology in this context means sequence similarity or identity, with identity being preferred. A preferred comparison for homology purposes is to compare the sequence containing sequencing errors to the correct sequence. This homology will be determined using standard techniques known in the art, including, but not limited to, the local homology algorithm of Smith & Waterman, Adv. Appl. Math. 2:482 (1981), by the homology alignment algorithm of Needleman & Wunsch, J. Mol. Biol. 48:443 (1970), by the search for similarity method of Pearson & Lipman, PNAS USA 85:2444 (1988), by computerized implementations of these algorithms (GAP, BESTFIT, FASTA, and TFASTA in the Wisconsin Genetics Software Package, Genetics Computer Group, 575 Science Drive, Madison, Wis.), the Best Fit sequence program described by Devereux et al., Nucl. Acid Res. 12:387-395 (1984), preferably using the default settings, or by inspection.

[0080] One example of a useful algorithm is PILEUP. PILEUP creates a multiple sequence alignment from a group of related sequences using progressive, pairwise alignments. It can also plot a tree showing the clustering relationships used to create the alignment. PILEUP uses a simplification of the progressive alignment method of Feng & Doolittle, J. Mol. Evol. 35:351-360 (1987); the method is similar to that described by Higgins & Sharp CABIOS 5:151-153 (1989). Useful PILEUP parameters include a default gap weight of 3.00, a default gap length weight of 0.10, and weighted end gaps.

[0081] Another example of a useful algorithm is the BLAST (Basic Local Alignment Search Tool) algorithm, described in Altschul et al., J. Mol. Biol. 215, 403-410, (1990) and Karlin et al., PNAS USA 90:5873-5787 (1993). A particularly useful BLAST program is the WU-BLAST-2 program which was obtained from Altschul et al., Methods in Enzymology, 266: 460-480 (1996); http://blast.wustl.edu/]. WU-BLAST-2 uses several search parameters, most of which are set to the default values. The adjustable parameters are set with the following values: overlap span=1, overlap fraction=0.125, word threshold (T)=11. The HSP S and HSP S2 parameters are dynamic values and are established by the program itself depending upon the composition of the particular sequence and composition of the particular database against which the sequence of interest is being searched; however, the values may be adjusted to increase sensitivity. A percent amino acid sequence identity value is determined by the number of matching identical residues divided by the total number of residues of the “longer” sequence in the aligned region. The “longer” sequence is the one having the most actual residues in the aligned region (gaps introduced by WU-Blast-2 to maximize the alignment score are ignored).

[0082] Thus, “percent (%) nucleic acid sequence identity” is defined as the percentage of nucleotide residues in a candidate sequence that are identical with the nucleotide residues of the nucleic acids of Tables 1-336. A preferred method utilizes the BLASTN module of WU-BLAST-2 set to the default parameters, with overlap span and overlap fraction set to 1 and 0.125, respectively.

[0083] The alignment may include the introduction of gaps in the sequences to be aligned. In addition, for sequences which contain either more or fewer nucleotides than those of the nucleic acids of Tables 1-336, it is understood that the percentage of homology will be determined based on the number of homologous nucleosides in relation to the total number of nucleosides. Thus homology of sequences shorter than those of the sequences identified herein will be determined using the number of nucleosides in the shorter sequence.

[0084] In another embodiment of the invention, polynucleotide compositions are provided that are capable of hybridizing under moderate to high stringency conditions to a polynucleotide sequence provided herein, or a fragment thereof, or a complementary sequence thereof. Hybridization techniques are well known in the art of molecular biology. For purposes of illustration, suitable moderately stringent conditions for testing the hybridization of a polynucleotide of this invention with other polynucleotides include prewashing in a solution of 5×SSC (“saline sodium citrate”; 9 mM NaCl, 0.9 mM sodium citrate), 0.5% SDS, 1.0 mM EDTA (pH 8.0); hybridizing at 50-60° C., 5×SSC, overnight; followed by washing twice at 65° C. for 20 minutes with each of 2×, 0.5× and 0.2×SSC containing 0.1% SDS. One skilled in the art will understand that the stringency of hybridization can be readily manipulated, such as by altering the salt content of the hybridization solution and/or the temperature at which the hybridization is performed. For example, in another embodiment, suitable highly stringent hybridization conditions include those described above, with the exception that the temperature of hybridization is increased, e.g., to 60-65° C., or 65-70° C. Stringent conditions may also be achieved with the addition of destabilizing agents such as formamide.

[0085] Thus nucleic acids that hybridize under high stringency to the nucleic acids identified in the figures, or their complements, are considered CA sequences. High stringency conditions are known in the art; see for example Maniatis et al., Molecular Cloning: A Laboratory Manual, 2d Edition, 1989, and Short Protocols in Molecular Biology, ed. Ausubel, et al., both of which are hereby incorporated by reference. Stringent conditions are sequence-dependent and will be different in different circumstances. Longer sequences hybridize specifically at higher temperatures. An extensive guide to the hybridization of nucleic acids is found in Tijssen, Techniques in Biochemistry and Molecular Biology—Hybridization with Nucleic Acid Probes, “Overview of principles of hybridization and the strategy of nucleic acid assays” (1993). Generally, stringent conditions are selected to be about 5-10° C. lower than the thermal melting point (Tₘ) for the specific sequence at a defined ionic strength pH. The Tₘ is the temperature (under defined ionic strength, pH and nucleic acid concentration) at which 50% of the probes complementary to the target hybridize to the target sequence at equilibrium (as the target sequences are present in excess, at Tₘ, 50% of the probes are occupied at equilibrium). Stringent conditions will be those in which the salt concentration is less than about 1.0 M sodium ion, typically about 0.01 to 1.0 M sodium ion concentration (or other salts) at pH 7.0 to 8.3 and the temperature is at least about 30° C. for short probes (e.g. 10 to 50 nucleotides) and at least about 60° C. for longer probes (e.g. greater than 50 nucleotides). In another embodiment, less stringent hybridization conditions are used; for example, moderate or low stringency conditions may be used, as are known in the art; see Maniatis and Ausubel, supra, and Tijssen, supra.

[0086] In addition, the CA nucleic acid sequences of the invention are fragments of larger genes, i.e. they are nucleic acid segments. Alternatively, the CA nucleic acid sequences can serve as indicators of oncogene position, for example, the CA sequence may be an enhancer that activates a proto-oncogene. “Genes” in this context includes coding regions, non-coding regions, and mixtures of coding and non-coding regions. Accordingly, as will be appreciated by those in the art, using the sequences provided herein, additional sequences of the CA genes can be obtained, using techniques well known in the art for cloning either longer sequences or the full-length sequences; see Maniatis et al., and Ausubel, et al., supra, hereby expressly incorporated by reference. In general, this is done using PCR, for example, kinetic PCR.

Detection of CA Expression

[0087] Once the CA nucleic acid is identified, it can be cloned and, if necessary, its constituent parts recombined to form the entire CA nucleic acid. Once isolated from its natural source, e.g., contained within a plasmid or other vector or excised therefrom as a linear nucleic acid segment, the recombinant CA nucleic acid can be further used as a probe to identify and isolate other CA nucleic acids, for example additional coding regions. It can also be used as a “precursor” nucleic acid to make modified or variant CA nucleic acids and proteins. In a preferred embodiment, once a CA gene is identified its nucleotide sequence is used to design probes specific for the CA gene.

[0088] The CA nucleic acids of the present invention are used in several ways. In a first embodiment, nucleic acid probes hybridizable to CA nucleic acids are made and attached to biochips to be used in screening and diagnostic methods, or for gene therapy and/or antisense applications. Alternatively, the CA nucleic acids that include coding regions of CA proteins can be put into expression vectors for the expression of CA proteins, again either for screening purposes or for administration to a patient.

[0089] Recent developments in DNA microarray technology make it possible to conduct a large scale assay of a plurality of target CA nucleic acid molecules on a single solid phase support. U.S. Pat. No. 5,837,832 (Chee et al.) and related patent applications describe immobilizing an array of oligonucleotide probes for hybridization and detection of specific nucleic acid sequences in a sample. Target polynucleotides of interest isolated from a tissue of interest are hybridized to the DNA chip and the specific sequences detected based on the target polynucleotides' preference and degree of hybridization at discrete probe locations. One important use of arrays is in the analysis of differential gene expression, where the profile of expression of genes in different cells, often a cell of interest and a control cell, is compared and any differences in gene expression among the respective cells are identified. Such information is useful for the identification of the types of genes expressed in a particular cell or tissue type and diagnosis of cancer conditions based on the expression profile.

[0090] Typically, RNA from the sample of interest is subjected to reverse transcription to obtain labeled cDNA. See U.S. Pat. No. 6,410,229 (Lockhart et al.) The cDNA is then hybridized to oligonucleotides or cDNAs of known sequence arrayed on a chip or other surface in a known order. The location of the oligonucleotide to which the labeled cDNA hybridizes provides sequence information on the cDNA, while the amount of labeled hybridized RNA or cDNA provides an estimate of the relative representation of the RNA or cDNA of interest. See Schena, et al. Science 270:467-470 (1995). For example, use of a cDNA microarray to analyze gene expression patterns in human cancer is described by DeRisi, et al. (Nature Genetics 14:457-460 (1996)).

[0091] In a preferred embodiment, nucleic acid probes corresponding to CA nucleic acids (both the nucleic acid sequences outlined in the figures and/or the complements thereof) are made. Typically, these probes are synthesized based on the disclosed sequences of this invention. The nucleic acid probes attached to the biochip are designed to be substantially complementary to the CA nucleic acids, i.e. the target sequence (either the target sequence of the sample or to other probe sequences, for example in sandwich assays), such that specific hybridization of the target sequence and the probes of the present invention occurs. As outlined below, this complementarity need not be perfect, in that there may be any number of base pair mismatches that will interfere with hybridization between the target sequence and the single stranded nucleic acids of the present invention. It is expected that the overall homology of the genes at the nucleotide level probably will be about 40% or greater, probably about 60% or greater, and even more probably about 80% or greater; and in addition that there will be corresponding contiguous sequences of about 8-12 nucleotides or longer. However, if the number of mutations is so great that no hybridization can occur under even the least stringent of hybridization conditions, the sequence is not a complementary target sequence. Thus, by “substantially complementary” herein is meant that the probes are sufficiently complementary to the target sequences to hybridize under normal reaction conditions, particularly high stringency conditions, as outlined herein. Whether or not a sequence is unique to a CA gene according to this invention can be determined by techniques known to those of skill in the art. For example, the sequence can be compared to sequences in databanks, e.g., GenBank, to determine whether it is present in the uninfected host or other organisms. The sequence can also be compared to the known sequences of other viral agents, including those that are known to induce cancer.

[0092] A nucleic acid probe is generally single stranded but can be partly single and partly double stranded. The strandedness of the probe is dictated by the structure, composition, and properties of the target sequence. In general, the oligonucleotide probes range from about 6, 8, 10, 12, 15, 20, 30 to about 100 bases long, with from about 10 to about 80 bases being preferred, and from about 30 to about 50 bases being particularly preferred. That is, generally entire genes are rarely used as probes. In some embodiments, much longer nucleic acids can be used, up to hundreds of bases. The probes are sufficiently specific to hybridize to complementary template sequence under conditions known by those of skill in the art. The number of mismatches between the probes sequences and their complementary template (target) sequences to which they hybridize during hybridization generally do not exceed 15%, usually do not exceed 10% and preferably do not exceed 5%, as determined by FASTA (default settings).

[0093] Oligonucleotide probes can include the naturally-occurring heterocyclic bases normally found in nucleic acids (uracil, cytosine, thymine, adenine and guanine), as well as modified bases and base analogues. Any modified base or base analogue compatible with hybridization of the probe to a target sequence is useful in the practice of the invention. The sugar or glycoside portion of the probe can comprise deoxyribose, ribose, and/or modified forms of these sugars, such as, for example, 2′-O-alkyl ribose. In a preferred embodiment, the sugar moiety is 2′-deoxyribose; however, any sugar moiety that is compatible with the ability of the probe to hybridize to a target sequence can be used.

[0094] In one embodiment, the nucleoside units of the probe are linked by a phosphodiester backbone, as is well known in the art. In additional embodiments, internucleotide linkages can include any linkage known to one of skill in the art that is compatible with specific hybridization of the probe including, but not limited to phosphorothioate, methylphosphonate, sulfamate (e.g., U.S. Pat. No. 5,470,967) and polyamide (i.e., peptide nucleic acids). Peptide nucleic acids are described in Nielsen et al. (1991) Science 254: 1497-1500, U.S. Pat. No. 5,714,331, and Nielsen (1999) Curr. Opin. Biotechnol. 10:71-75.

[0095] In certain embodiments, the probe can be a chimeric molecule; i.e., can comprise more than one type of base or sugar subunit, and/or the linkages can be of more than one type within the same primer. The probe can comprise a moiety to facilitate hybridization to its target sequence, as are known in the art, for example, intercalators and/or minor groove binders. Variations of the bases, sugars, and internucleoside backbone, as well as the presence of any pendant group on the probe, will be compatible with the ability of the probe to bind, in a sequence-specific fashion, with its target sequence. A large number of structural modifications, both known and to be developed, are possible within these bounds. Advantageously, the probes according to the present invention may have structural characteristics such that they allow the signal amplification, such structural characteristics being, for example, branched DNA probes as those described by Urdea et al. (Nucleic Acids Symp. Ser., 24:197-200 (1991)) or in the European Patent No. EP-0225,807. Moreover, synthetic methods for preparing the various heterocyclic bases, sugars, nucleosides and nucleotides that form the probe, and preparation of oligonucleotides of specific predetermined sequence, are well-developed and known in the art. A preferred method for oligonucleotide synthesis incorporates the teaching of U.S. Pat. No. 5,419,966.

[0096] Multiple probes may be designed for a particular target nucleic acid to account for polymorphism and/or secondary structure in the target nucleic acid, redundancy of data and the like. In some embodiments, where more than one probe per sequence is used, either overlapping probes or probes to different sections of a single target CA gene are used. That is, two, three, four or more probes, with three being preferred, are used to build in a redundancy for a particular target. The probes can be overlapping (i.e. have some sequence in common), or specific for distinct sequences of a CA gene. When multiple target polynucleotides are to be detected according to the present invention, each probe or probe group corresponding to a particular target polynucleotide is situated in a discrete area of the microarray.

[0097] Probes may be in solution, such as in wells or on the surface of a micro-array, or attached to a solid support. Examples of solid support materials that can be used include a plastic, a ceramic, a metal, a resin, a gel and a membrane. Useful types of solid supports include plates, beads, magnetic material, microbeads, hybridization chips, membranes, crystals, ceramics and self-assembling monolayers. A preferred embodiment comprises a two-dimensional or three-dimensional matrix, such as a gel or hybridization chip with multiple probe binding sites (Pevzner et al., J. Biomol. Struc. & Dyn. 9:399-410, 1991; Maskos and Southern, Nuc. Acids Res. 20:1679-84, 1992). Hybridization chips can be used to construct very large probe arrays that are subsequently hybridized with a target nucleic acid. Analysis of the hybridization pattern of the chip can assist in the identification of the target nucleotide sequence. Patterns can be manually or computer analyzed, but it is clear that positional sequencing by hybridization lends itself to computer analysis and automation. Algorithms and software, which have been developed for sequence reconstruction, are applicable to the methods described herein (R. Drmanac et al., J. Biomol. Struc. & Dyn. 5:1085-1102, 1991; P. A. Pevzner, J. Biomol. Struc. & Dyn. 7:63-73, 1989).

[0098] As will be appreciated by those in the art, nucleic acids can be attached or immobilized to a solid support in a wide variety of ways. By “immobilized” herein is meant the association or binding between the nucleic acid probe and the solid support is sufficient to be stable under the conditions of binding, washing, analysis, and removal as outlined below. The binding can be covalent or non-covalent. By “non-covalent binding” and grammatical equivalents herein is meant one or more of either electrostatic, hydrophilic, and hydrophobic interactions. Included in non-covalent binding is the covalent attachment of a molecule, such as streptavidin, to the support and the non-covalent binding of the biotinylated probe to the streptavidin. By “covalent binding” and grammatical equivalents herein is meant that the two moieties, the solid support and the probe, are attached by at least one bond, including sigma bonds, pi bonds and coordination bonds. Covalent bonds can be formed directly between the probe and the solid support or can be formed by a cross linker or by inclusion of a specific reactive group on either the solid support or the probe or both molecules. Immobilization may also involve a combination of covalent and non-covalent interactions.

[0099] Nucleic acid probes may be attached to the solid support by covalent binding such as by conjugation with a coupling agent or by, covalent or non-covalent binding such as electrostatic interactions, hydrogen bonds or antibody-antigen coupling, or by combinations thereof. Typical coupling agents include biotin/avidin, biotin/streptavidin, Staphylococcus aureus protein A/IgG antibody F_{c} fragment, and streptavidin/protein A chimeras (T. Sano and C. R. Cantor, Bio/Technology 9:1378-81 (1991)), or derivatives or combinations of these agents. Nucleic acids may be attached to the solid support by a photocleavable bond, an electrostatic bond, a disulfide bond, a peptide bond, a diester bond or a combination of these sorts of bonds. The array may also be attached to the solid support by a selectively releasable bond such as 4,4′-dimethoxytrityl or its derivative. Derivatives which have been found to be useful include 3 or 4 [bis-(4-methoxyphenyl)]-methyl-benzoic acid, N-succinimidyl-3 or 4 [bis-(4-methoxyphenyl)]-methyl-benzoic acid, N-succinimidyl-3 or 4 [bis-(4-methoxyphenyl)]-hydroxymethyl-benzoic acid, N-succinimidyl-3 or 4 [bis-(4-methoxyphenyl)]-chloromethyl-benzoic acid, and salts of these acids.

[0100] In general, the probes are attached to the biochip in a wide variety of ways, as will be appreciated by those in the art. As described herein, the nucleic acids can either be synthesized first, with subsequent attachment to the biochip, or can be directly synthesized on the biochip.

[0101] The biochip comprises a suitable solid substrate. By “substrate” or “solid support” or other grammatical equivalents herein is meant any material that can be modified to contain discrete individual sites appropriate for the attachment or association of the nucleic acid probes and is amenable to at least one detection method. The solid phase support of the present invention can be of any solid materials and structures suitable for supporting nucleotide hybridization and synthesis. Preferably, the solid phase support comprises at least one substantially rigid surface on which the primers can be immobilized and the reverse transcriptase reaction performed. The substrates with which the polynucleotide microarray elements are stably associated may be fabricated from a variety of materials, including plastics, ceramics, metals, acrylamide, cellulose, nitrocellulose, glass, polystyrene, polyethylene vinyl acetate, polypropylene, polymethacrylate, polyethylene, polyethylene oxide, polysilicates, polycarbonates, Teflon®, fluorocarbons, nylon, silicon rubber, polyanhydrides, polyglycolic acid, polylactic acid, polyorthoesters, polypropylfumerate, collagen, glycosaminoglycans, and polyamino acids. Substrates may be two-dimensional or three-dimensional in form, such as gels, membranes, thin films, glasses, plates, cylinders, beads, magnetic beads, optical fibers, woven fibers, etc. A preferred form of array is a three-dimensional array. A preferred three-dimensional array is a collection of tagged beads. Each tagged bead has different primers attached to it. Tags are detectable by signaling means such as color (Luminex, Illumina) and electromagnetic field (Pharmaseq) and signals on tagged beads can even be remotely detected (e.g., using optical fibers). The size of the solid support can be any of the standard microarray sizes, useful for DNA microarray technology, and the size may be tailored to fit the particular machine being used to conduct a reaction of the invention. In general, the substrates allow optical detection and do not appreciably fluoresce.

[0102] In a preferred embodiment, the surface of the biochip and the probe may be derivatized with chemical functional groups for subsequent attachment of the two. Thus, for example, the biochip is derivatized with a chemical functional group including, but not limited to, amino groups, carboxy groups, oxo groups and thiol groups, with amino groups being particularly preferred. Using these functional groups, the probes can be attached using functional groups on the probes. For example, nucleic acids containing amino groups can be attached to surfaces comprising amino groups, for example using linkers as are known in the art; for example, homo- or hetero-bifunctional linkers as are well known (see 1994 Pierce Chemical Company catalog, technical section on cross-linkers, pages 155-200, incorporated herein by reference). In addition, in some cases, additional linkers, such as alkyl groups (including substituted and heteroalkyl groups) may be used.

[0103] In this embodiment, the oligonucleotides are synthesized as is known in the art, and then attached to the surface of the solid support. As will be appreciated by those skilled in the art, either the 5′ or 3′ terminus may be attached to the solid support, or attachment may be via an internal nucleoside. In an additional embodiment, the immobilization to the solid support may be very strong, yet non-covalent. For example, biotinylated oligonucleotides can be made, which bind to surfaces covalently coated with streptavidin, resulting in attachment.

[0104] The arrays may be produced according to any convenient methodology, such as preforming the polynucleotide microarray elements and then stably associating them with the surface. Alternatively, the oligonucleotides may be synthesized on the surface, as is known in the art. A number of different array configurations and methods for their production are known to those of skill in the art and disclosed in WO 95/25116 and WO 95/35505 (photolithographic techniques), U.S. Pat. No. 5,445,934 (in situ synthesis by photolithography), U.S. Pat. No. 5,384,261 (in situ synthesis by mechanically directed flow paths); and U.S. Pat. No. 5,700,637 (synthesis by spotting, printing or coupling); the disclosure of which are herein incorporated in their entirety by reference. Another method for coupling DNA to beads uses specific ligands attached to the end of the DNA to link to ligand-binding molecules attached to a bead. Possible ligand-binding partner pairs include biotin-avidin/streptavidin, or various antibody/antigen pairs such as digoxygenin-antidigoxygenin antibody (Smith et al., “Direct Mechanical Measurements of the Elasticity of Single DNA Molecules by Using Magnetic Beads,” Science 258:1122-1126 (1992)). Covalent chemical attachment of DNA to the support can be accomplished by using standard coupling agents to link the 5′-phosphate on the DNA to coated microspheres through a phosphoamidate bond. Methods for immobilization of oligonucleotides to solid-state substrates are well established. See Pease et al., Proc. Natl. Acad. Sci. USA 91(11):5022-5026 (1994). A preferred method of attaching oligonucleotides to solid-state substrates is described by Guo et al., Nucleic Acids Res. 22:5456-5465 (1994). Immobilization can be accomplished either by in situ DNA synthesis (Maskos and Southern, Nucleic Acids Research, 20:1679-1684 (1992) or by covalent attachment of chemically synthesized oligonucleotides (Guo et al., supra) in combination with robotic arraying technologies.

[0105] In addition to the solid-phase technology represented by biochip arrays, gene expression can also be quantified using liquid-phase arrays. One such system is kinetic polymerase chain reaction (PCR). Kinetic PCR allows for the simultaneous amplification and quantification of specific nucleic acid sequences. The specificity is derived from synthetic oligonucleotide primers designed to preferentially adhere to single-stranded nucleic acid sequences bracketing the target site. This pair of oligonucleotide primers form specific, non-covalently bound complexes on each strand of the target sequence. These complexes facilitate in vitro transcription of double-stranded DNA in opposite orientations. Temperature cycling of the reaction mixture creates a continuous cycle of primer binding, transcription, and re-melting of the nucleic acid to individual strands. The result is an exponential increase of the target dsDNA product. This product can be quantified in real time either through the use of an intercalating dye or a sequence specific probe. SYBR® Greene I, is an example of an intercalating dye, that preferentially binds to dsDNA resulting in a concomitant increase in the fluorescent signal. Sequence specific probes, such as used with TaqMan® technology, consist of a fluorochrome and a quenching molecule covalently bound to opposite ends of an oligonucleotide. The probe is designed to selectively bind the target DNA sequence between the two primers. When the DNA strands are synthesized during the PCR reaction, the fluorochrome is cleaved from the probe by the exonuclease activity of the polymerase resulting in signal dequenching. The probe signaling method can be more specific than the intercalating dye method, but in each case, signal strength is proportional to the dsDNA product produced. Each type of quantification method can be used in multi-well liquid phase arrays with each well representing primers and/or probes specific to nucleic acid sequences of interest. When used with messenger RNA preparations of tissues or cell lines, an array of probe/primer reactions can simultaneously quantify the expression of multiple gene products of interest. See Germer, S., et al., Genome Res. 10:258-266 (2000); Heid, C. A., et al., Genome Res. 6, 986-994 (1996).

Expression of CA Proteins

[0106] In a preferred embodiment, CA nucleic acids encoding CA proteins are used to make a variety of expression vectors to express CA proteins which can then be used in screening assays, as described below. The expression vectors may be either self-replicating extrachromosomal vectors or vectors which integrate into a host genome. Generally, these expression vectors include transcriptional and translational regulatory nucleic acid operably linked to the nucleic acid encoding the CA protein. The term “control sequences” refers to DNA sequences necessary for the expression of an operably linked coding sequence in a particular host organism. The control sequences that are suitable for prokaryotes, for example, include a promoter, optionally an operator sequence, and a ribosome binding site. Eukaryotic cells are known to utilize promoters, polyadenylation signals, and enhancers.

[0107] Nucleic acid is “operably linked” when it is placed into a functional relationship with another nucleic acid sequence. For example, DNA for a presequence or secretory leader is operably linked to DNA for a polypeptide if it is expressed as a preprotein that participates in the secretion of the polypeptide; a promoter or enhancer is operably linked to a coding sequence if it affects the transcription of the sequence; or a ribosome binding site is operably linked to a coding sequence if it is positioned so as to facilitate translation. Generally, “operably linked” means that the DNA sequences being linked are contiguous, and, in the case of a secretory leader, contiguous and in reading phase. However, enhancers do not have to be contiguous. Linking is accomplished by ligation at convenient restriction sites. If such sites do not exist, synthetic oligonucleotide adaptors or linkers are used in accordance with conventional practice. The transcriptional and translational regulatory nucleic acid will generally be appropriate to the host cell used to express the CA protein; for example, transcriptional and translational regulatory nucleic acid sequences from Bacillus are preferably used to express the CA protein in Bacillus. Numerous types of appropriate expression vectors, and suitable regulatory sequences are known in the art for a variety of host cells.

[0108] In general, the transcriptional and translational regulatory sequences may include, but are not limited to, promoter sequences, ribosomal binding sites, transcriptional start and stop sequences, translational start and stop sequences, and enhancer or activator sequences. In a preferred embodiment, the regulatory sequences include a promoter and transcriptional start and stop sequences.

[0109] Promoter sequences encode either constitutive or inducible promoters. The promoters may be either naturally occurring promoters or hybrid promoters. Hybrid promoters, which combine elements of more than one promoter, are also known in the art, and are useful in the present invention.

[0110] In addition, the expression vector may comprise additional elements. For example, the expression vector may have two replication systems, thus allowing it to be maintained in two organisms, for example in mammalian or insect cells for expression and in a prokaryotic host for cloning and amplification. Furthermore, for integrating expression vectors, the expression vector contains at least one sequence homologous to the host cell genome, and preferably two homologous sequences that flank the expression construct. The integrating vector may be directed to a specific locus in the host cell by selecting the appropriate homologous sequence for inclusion in the vector. Constructs for integrating vectors are well known in the art.

[0111] In addition, in a preferred embodiment, the expression vector contains a selectable marker gene to allow the selection of transformed host cells. Selection genes are well known in the art and will vary with the host cell used.

[0112] The CA proteins of the present invention are produced by culturing a host cell transformed with an expression vector containing nucleic acid encoding a CA protein, under the appropriate conditions to induce or cause expression of the CA protein. The conditions appropriate for CA protein expression will vary with the choice of the expression vector and the host cell, and will be easily ascertained by one skilled in the art through routine experimentation. For example, the use of constitutive promoters in the expression vector will require optimizing the growth and proliferation of the host cell, while the use of an inducible promoter requires the appropriate growth conditions for induction. In addition, in some embodiments, the timing of the harvest is important. For example, the baculoviral systems used in insect cell expression are lytic viruses, and thus harvest time selection can be crucial for product yield.

[0113] Appropriate host cells include yeast, bacteria, archaebacteria, fungi, and insect, plant and animal cells, including mammalian cells. Of particular interest are Drosophila melanogaster cells, Saccharomyces cerevisiae and other yeasts, E. coli, Bacillus subtilis, Sf9 cells, C129 cells, 293 cells, Neurospora, BHK, CHO, COS, HeLa cells, THP1 cell line (a macrophage cell line) and human cells and cell lines.

[0114] In a preferred embodiment, the CA proteins are expressed in mammalian cells. Mammalian expression systems are also known in the art, and include retroviral systems. A preferred expression vector system is a retroviral vector system such as is generally described in PCT/US97/01019 and PCT/US97/01048, both of which are hereby expressly incorporated by reference. Of particular use as mammalian promoters are the promoters from mammalian viral genes, since the viral genes are often highly expressed and have a broad host range. Examples include the SV40 early promoter, mouse mammary tumor virus LTR promoter, adenovirus major late promoter, herpes simplex virus promoter, and the CMV promoter. Typically, transcription termination and polyadenylation sequences recognized by mammalian cells are regulatory regions located 3′ to the translation stop codon and thus, together with the promoter elements, flank the coding sequence. Examples of transcription terminator and polyadenylation signals include those derived form SV40.

[0115] The methods of introducing exogenous nucleic acid into mammalian hosts, as well as other hosts, are well known in the art, and will vary with the host cell used. Techniques include dextran-mediated transfection, calcium phosphate precipitation, polybrene mediated transfection, protoplast fusion, electroporation, viral infection, encapsulation of the polynucleotide(s) in liposomes, and direct microinjection of the DNA into nuclei.

[0116] In a preferred embodiment, CA proteins are expressed in bacterial systems. Bacterial expression systems are well known in the art. Promoters from bacteriophage may also be used and are known in the art. In addition, synthetic promoters and hybrid promoters are also useful; for example, the tac promoter is a hybrid of the trp and lac promoter sequences. Furthermore, a bacterial promoter can include naturally occurring promoters of non-bacterial origin that have the ability to bind bacterial RNA polymerase and initiate transcription. In addition to a functioning promoter sequence, an efficient ribosome binding site is desirable. The expression vector may also include a signal peptide sequence that provides for secretion of the CA protein in bacteria. The protein is either secreted into the growth media (gram-positive bacteria) or into the periplasmic space, located between the inner and outer membrane of the cell (gram-negative bacteria). The bacterial expression vector may also include a selectable marker gene to allow for the selection of bacterial strains that have been transformed. Suitable selection genes include genes that render the bacteria resistant to drugs such as ampicillin, chloramphenicol, erythromycin, kanamycin, neomycin and tetracycline. Selectable markers also include biosynthetic genes, such as those in the histidine, tryptophan and leucine biosynthetic pathways. These components are assembled into expression vectors. Expression vectors for bacteria are well known in the art, and include vectors for Bacillus subtilis, E. coli, Streptococcus cremoris, and Streptococcus lividans, among others. The bacterial expression vectors are transformed into bacterial host cells using techniques well known in the art, such as calcium chloride treatment, electroporation, and others.

[0117] In one embodiment, CA proteins are produced in insect cells. Expression vectors for the transformation of insect cells, and in particular, baculovirus-based expression vectors, are well known in the art.

[0118] In a preferred embodiment, CA protein is produced in yeast cells. Yeast expression systems are well known in the art, and include expression vectors for Saccharomyces cerevisiae, Candida albicans and C. maltosa, Hansenula polymorpha, Kluyveromyces fragilis and K lactis, Pichia guillerimondii and P. pastoris, Schizosaccharomyces pombe, and Yarrowia lipolytica.

[0119] The CA protein may also be made as a fusion protein, using techniques well known in the art. Thus, for example, for the creation of monoclonal antibodies. If the desired epitope is small, the CA protein may be fused to a carrier protein to form an immunogen. Alternatively, the CA protein may be made as a fusion protein to increase expression, or for other reasons. For example, when the CA protein is a CA peptide, the nucleic acid encoding the peptide may be linked to other nucleic acid for expression purposes.

[0120] In one embodiment, the CA nucleic acids, proteins and antibodies of the invention are labeled. By “labeled” herein is meant that a compound has at least one element, isotope or chemical compound attached to enable the detection of the compound. In general, labels fall into three classes: a) isotopic labels, which may be radioactive or heavy isotopes; b) immune labels, which may be antibodies or antigens; and c) colored or fluorescent dyes. The labels may be incorporated into the CA nucleic acids, proteins and antibodies at any position. For example, the label should be capable of producing, either directly or indirectly, a detectable signal. The detectable moiety may be a radioisotope, such as ³H, ¹⁴C, ³²P, ³⁵S, or ¹²⁵I, a fluorescent or chemiluminescent compound, such as fluorescein isothiocyanate, rhodamine, or luciferin, or an enzyme, such as alkaline phosphatase, beta-galactosidase or horseradish peroxidase. Any method known in the art for conjugating the antibody to the label may be employed, including those methods described by Hunter et al., Nature, 144:945 (1962); David et al., Biochemistry, 13:1014 (1974); Pain et al., J. Immunol. Meth., 40:219 (1981); and Nygren, J. Histochem. and Cytochem., 30:407 (1982).

[0121] Accordingly, the present invention also provides CA protein sequences. A CA protein of the present invention may be identified in several ways. “Protein” in this sense includes proteins, polypeptides, and peptides. As will be appreciated by those in the art, the nucleic acid sequences of the invention can be used to generate protein sequences. There are a variety of ways to do this, including cloning the entire gene and verifying its frame and amino acid sequence, or by comparing it to known sequences to search for homology to provide a frame, assuming the CA protein has homology to some protein in the database being used. Generally, the nucleic acid sequences are input into a program that will search all three frames for homology. This is done in a preferred embodiment using the following NCBI Advanced BLAST parameters. The program is blastx or blastn. The database is nr. The input data is as “Sequence in FASTA format”. The organism list is “none”. The “expect” is 10; the filter is default. The “descriptions” is 500, the “alignments” is 500, and the “alignment view” is pairwise. The “query Genetic Codes” is standard (1). The matrix is BLOSUM 62; gap existence cost is 11, per residue gap cost is 1; and the lambda ratio is 0.85 default. This results in the generation of a putative protein sequence.

[0122] In general, the term “polypeptide” as used herein refers to both the full-length polypeptide encoded by the recited polynucleotide, the polypeptide encoded by the gene represented by the recited polynucleotide, as well as portions or fragments thereof. The present invention encompasses variants of the naturally occurring proteins, wherein such variants are homologous or substantially similar to the naturally occurring protein, and can be of an origin of the same or different species as the naturally occurring protein (e.g., human, murine, or some other species that naturally expresses the recited polypeptide, usually a mammalian species). In general, variant polypeptides have a sequence that has at least about 80%, at least about 81%, at least about 82%, at least about 83%, at least about 84%, at least about 85%, at least about 86%, at least about 87%, at least about 88%, at least about 89%, usually at least about 90%, at least 91%, at least 92%, at least 93%, at least 94%, at least 95%, at least 96%, at least 97%, at least 98% and more usually at least about 99% sequence identity with a differentially expressed polypeptide described herein, as determined by the Smith-Waterman homology search algorithm using an affine gap search with a gap open penalty of 12 and a gap extension penalty of 2, BLOSUM matrix of 62. The Smith-Waterman homology search algorithm is taught in Smith and Waterman, Adv. Appl. Math. (1981) 2: 482-489. The variant polypeptides can be naturally or non-naturally glycosylated, i.e., the polypeptide has a glycosylation pattern that differs from the glycosylation pattern found in the corresponding naturally occurring protein.

[0123] Also within the scope of the invention are variants. Variants of polypeptides include mutants, fragments, and fusions. Mutants can include amino acid substitutions, additions or deletions. The amino acid substitutions can be conservative amino acid substitutions or substitutions to eliminate non-essential amino acids, such as to alter a glycosylation site, a phosphorylation site or an acetylation site, or to minimize misfolding by substitution or deletion of one or more cysteine residues that are not necessary for function. Conservative amino acid substitutions are those that preserve the general charge, hydrophobicity/hydrophilicity, and/or steric bulk of the amino acid substituted. Variants can be designed so as to retain or have enhanced biological activity of a particular region of the protein (e.g., a functional domain and/or, where the polypeptide is a member of a protein family, a region associated with a consensus sequence). Selection of amino acid alterations for production of variants can be based upon the accessibility (interior vs. exterior) of the amino acid (see, e.g., Go et al, Int. J. Peptide Protein Res. (1980) 15:211), the thermostability of the variant polypeptide (see, e.g., Querol et al., Prot. Eng. (1996) 9:265), desired glycosylation sites (see, e.g., Olsen and Thomsen, J. Gen. Microbiol. (1991) 137:579), desired disulfide bridges (see, e.g., Clarke et al., Biochemistry (1993) 32:4322; and Wakarchuk et al., Protein Eng. (1994) 7:1379), desired metal binding sites (see, e.g., Toma et al., Biochemistry (1991) 30:97, and Haezerbrouck et al., Protein Eng. (1993) 6:643), and desired substitutions within proline loops (see, e.g., Masul et al., Appl. Env. Microbiol. (1994) 60:3579). Cysteine-depleted muteins can be produced as disclosed in U.S. Pat. No. 4,959,314.

[0124] Variants also include fragments of the polypeptides disclosed herein, particularly biologically active fragments and/or fragments corresponding to functional domains. Fragments of interest will typically be at least about 8 amino acids (aa) 10 aa, 15 aa, 20 aa, 25 aa, 30 aa, 35 aa, 40 aa, to at least about 45 aa in length, usually at least about 50 aa in length, at least about 75 aa, at least about 100 aa, at least about 125 aa, at least about 150 aa in length, at least about 200 aa, at least about 300 aa, at least about 400 aa and can be as long as 500 aa in length or longer, but will usually not exceed about 1000 aa in length, where the fragment will have a stretch of amino acids that is identical to a polypeptide encoded by a polynucleotide having a sequence of any one of the polynucleotide sequences provided herein, or a homolog thereof. The protein variants described herein are encoded by polynucleotides that are within the scope of the invention. The genetic code can be used to select the appropriate codons to construct the corresponding variants.

[0125] While altered expression of the polynucleotides associated with cancer is observed, altered levels of expression of the polypeptides encoded by these polynucleotides may likely play a role in cancers.

[0126] Also included within one embodiment of CA proteins are amino acid variants of the naturally occurring sequences, as determined herein. Preferably, the variants are preferably greater than about 75% homologous to the wild-type sequence, more preferably greater than about 80%, even more preferably greater than about 85% and most preferably greater than 90%. The present application is also directed to proteins containing polypeptides at least 80%, 85%, 90%, 95%, 96%, 97%, 98% or 99% identical to a CA polypeptide sequence set forth herein. As for nucleic acids, homology in this context means sequence similarity or identity, with identity being preferred. This homology will be determined using standard techniques known in the art as are outlined above for the nucleic acid homologies.

[0127] CA proteins of the present invention may be shorter or longer than the wild type amino acid sequences. Thus, in a preferred embodiment, included within the definition of CA proteins are portions or fragments of the wild type sequences herein. In addition, as outlined above, the CA nucleic acids of the invention may be used to obtain additional coding regions, and thus additional protein sequence, using techniques known in the art.

[0128] In a preferred embodiment, the CA proteins are derivative or variant CA proteins as compared to the wild-type sequence. That is, as outlined more fully below, the derivative CA peptide will contain at least one amino acid substitution, deletion or insertion, with amino acid substitutions being particularly preferred. The amino acid substitution, insertion or deletion may occur at any residue within the CA peptide.

[0129] Also included in an embodiment of CA proteins of the present invention are amino acid sequence variants. These variants fall into one or more of three classes: substitutional, insertional or deletional variants. These variants ordinarily are prepared by site-specific mutagenesis of nucleotides in the DNA encoding the CA protein, using cassette or PCR mutagenesis or other techniques well known in the art, to produce DNA encoding the variant, and thereafter expressing the DNA in recombinant cell culture as outlined above. However, variant CA protein fragments having up to about 100-150 residues may be prepared by in vitro synthesis using established techniques. Amino acid sequence variants are characterized by the predetermined nature of the variation, a feature that sets them apart from naturally occurring allelic or interspecies variation of the CA protein amino acid sequence. The variants typically exhibit the same qualitative biological activity as the naturally occurring analogue, although variants can also be selected which have modified characteristics as will be more fully outlined below.

[0130] While the site or region for introducing an amino acid sequence variation is predetermined, the mutation per se need not be predetermined. For example, in order to optimize the performance of a mutation at a given site, random mutagenesis may be conducted at the target codon or region and the expressed CA variants screened for the optimal combination of desired activity. Techniques for making substitution mutations at predetermined sites in DNA having a known sequence are well known, for example, M13 primer mutagenesis and LAR mutagenesis. Screening of the mutants is done using assays of CA protein activities.

[0131] Amino acid substitutions are typically of single residues; insertions usually will be on the order of from about 1 to 20 amino acids, although considerably larger insertions may be tolerated. Deletions range from about 1 to about 20 residues, although in some cases deletions may be much larger.

[0132] Substitutions, deletions, insertions or any combination thereof may be used to arrive at a final derivative. Generally these changes are done on a few amino acids to minimize the alteration of the molecule. However, larger changes may be tolerated in certain circumstances. When small alterations in the characteristics of the CA protein are desired, substitutions are generally made in accordance with the following chart:

CHART 1

| Original Residue | Exemplary Substitutions |
|---|---|
| Ala | Ser |
| Arg | Lys |
| Asn | Gln, His |
| Asp | Glu |
| Cys | Ser |
| Gln | Asn |
| Glu | Asp |
| Gly | Pro |
| His | Asn, Gln |
| Ile | Leu, Val |
| Leu | Ile, Val |
| Lys | Arg, Gln, Glu |
| Met | Leu, Ile |
| Phe | Met, Leu, Tyr |
| Ser | Thr |
| Thr | Ser |
| Trp | Tyr |
| Tyr | Trp, Phe |
| Val | Ile, Leu |

[0133] Substantial changes in function or immunological identity are made by selecting substitutions that are less conservative than those shown in Chart I. For example, substitutions may be made full length to more significantly affect one or more of the following: the structure of the polypeptide backbone in the area of the alteration (e.g., the alpha-helical or beta-sheet structure); the charge or hydrophobicity of the molecule at the target site; and the bulk of the side chain. The substitutions which in general are expected to produce the greatest changes in the polypeptide's properties are those in which (a) a hydrophilic residue, e.g. seryl or threonyl is substituted for (or by) a hydrophobic residue, e.g. leucyl, isoleucyl, phenylalanyl, valyl or alanyl; (b) a cysteine or proline is substituted for (or by) any other residue; (c) a residue having an electropositive side chain, e.g. lysyl, arginyl, or histidyl, is substituted for (or by) an electronegative residue, e.g. glutamyl or aspartyl; or (d) a residue having a bulky side chain, e.g. phenylalanine, is substituted for (or by) one not having a side chain, e.g. glycine.

[0134] The variants typically exhibit the same qualitative biological activity and will elicit the same immune response as the naturally-occurring analogue, although variants also are selected to modify the characteristics of the CA proteins as needed. Alternatively, the variant may be designed such that the biological activity of the CA protein is altered. For example, glycosylation sites may be altered or removed, dominant negative mutations created, etc.

[0135] Covalent modifications of CA polypeptides are included within the scope of this invention, for example for use in screening. One type of covalent modification includes reacting targeted amino acid residues of a CA polypeptide with an organic derivatizing agent that is capable of reacting with selected side chains or the N- or C-terminal residues of a CA polypeptide. Derivatization with bifunctional agents is useful, for instance, for crosslinking CA polypeptides to a water-insoluble support matrix or surface for use in the method for purifying anti-CA antibodies or screening assays, as is more fully described below. Commonly used crosslinking agents include, e.g., 1,1-bis(diazoacetyl)-2-phenylethane, glutaraldehyde, N-hydroxysuccinimide esters, for example, esters with 4-azidosalicylic acid, homobifunctional imidoesters, including disuccinimidyl esters such as 3,3′-dithiobis(succinimidylpropionate), bifunctional maleimides such as bis-N-maleimido-1,8-octane and agents such as methyl-3-[(p-azidophenyl)dithio]propioimidate.

[0136] Other modifications include deamidation of glutaminyl and asparaginyl residues to the corresponding glutamyl and aspartyl residues, respectively, hydroxylation of proline and lysine, phosphorylation of hydroxyl groups of seryl, threonyl or tyrosyl residues, methylation of the α-amino groups of lysine, arginine, and histidine side chains [T. E. Creighton, Proteins: Structure and Molecular Properties, W.H. Freeman & Co., San Francisco, pp. 79-86 (1983)], acetylation of the N-terminal amine, and amidation of any C-terminal carboxyl group.

[0137] Another type of covalent modification of the CA polypeptide included within the scope of this invention comprises altering the native glycosylation pattern of the polypeptide. “Altering the native glycosylation pattern” is intended for purposes herein to mean deleting one or more carbohydrate moieties found in native sequence CA polypeptide, and/or adding one or more glycosylation sites that are not present in the native sequence CA polypeptide.

[0138] Addition of glycosylation sites to CA polypeptides may be accomplished by altering the amino acid sequence thereof. The alteration may be made, for example, by the addition of, or substitution by, one or more serine or threonine residues to the native sequence CA polypeptide (for O-linked glycosylation sites). The CA amino acid sequence may optionally be altered through changes at the DNA level, particularly by mutating the DNA encoding the CA polypeptide at preselected bases such that codons are generated that will translate into the desired amino acids.

[0139] Another means of increasing the number of carbohydrate moieties on the CA polypeptide is by chemical or enzymatic coupling of glycosides to the polypeptide. Such methods are described in the art, e.g., in WO 87/05330 published 11 Sep. 1987, and in Aplin and Wriston, L A Crit. Rev. Biochem., pp. 259-306 (1981).

[0140] Removal of carbohydrate moieties present on the CA polypeptide may be accomplished chemically or enzymatically or by mutational substitution of codons encoding for amino acid residues that serve as targets for glycosylation. Chemical deglycosylation techniques are known in the art and described, for instance, by Hakimuddin, et al., Arch. Biochem. Biophys., 259:52 (1987) and by Edge et al., Anal. Biochem., 118:131 (1981). Enzymatic cleavage of carbohydrate moieties on polypeptides can be achieved by the use of a variety of endo- and exo-glycosidases as described by Thotakura et al., Meth. Enzymol., 138:350 (1987).

[0141] Another type of covalent modification of CA comprises linking the CA polypeptide to one of a variety of nonproteinaceous polymers, e.g., polyethylene glycol, polypropylene glycol, or polyoxyalkylenes, in the manner set forth in U.S. Pat. No. 4,640,835; 4,496,689; 4,301,144; 4,670,417; 4,791,192 or 4,179,337.

[0142] CA polypeptides of the present invention may also be modified in a way to form chimeric molecules comprising a CA polypeptide fused to another, heterologous polypeptide or amino acid sequence. In one embodiment, such a chimeric molecule comprises a fusion of a CA polypeptide with a tag polypeptide that provides an epitope to which an anti-tag antibody can selectively bind. The epitope tag is generally placed at the amino- or carboxyl-terminus of the CA polypeptide, although internal fusions may also be tolerated in some instances. The presence of such epitope-tagged forms of a CA polypeptide can be detected using an antibody against the tag polypeptide. Also, provision of the epitope tag enables the CA polypeptide to be readily purified by affinity purification using an anti-tag antibody or another type of affinity matrix that binds to the epitope tag. In an alternative embodiment, the chimeric molecule may comprise a fusion of a CA polypeptide with an immunoglobulin or a particular region of an immunoglobulin. For a bivalent form of the chimeric molecule, such a fusion could be to the Fc region of an IgG molecule.

[0143] Various tag polypeptides and their respective antibodies are well known in the art. Examples include poly-histidine (poly-his) or poly-histidine-glycine (poly-his-gly) tags; the flu HA tag polypeptide and its antibody 12CA5 [Field et al., Mol. Cell. Biol., 8:2159-2165 (1988)]; the c-myc tag and the 8F9, 3C7, 6E10, G4, B7 and 9E10 antibodies thereto [Evan et al., Molecular and Cellular Biology, 5:3610-3616 (1985)]; and the Herpes Simplex virus glycoprotein D (gD) tag and its antibody [Paborsky et al., Protein Engineering, 3(6):547-553 (1990)]. Other tag polypeptides include the Flag-peptide [Hopp et al., BioTechnology, 6:1204-1210 (1988)]; the KT3 epitope peptide [Martin et al., Science, 255:192-194 (1992)]; tubulin epitope peptide [Skinner et al., J. Biol. Chem., 266:15163-15166 (1991)]; and the T7 gene 10 protein peptide tag [Lutz-Freyermuth et al., Proc. Natl. Acad. Sci. USA, 87:6393-6397 (1990)].

[0144] Also included with the definition of CA protein in one embodiment are other CA proteins of the CA family, and CA proteins from other organisms, which are cloned and expressed as outlined below. Thus, probe or degenerate polymerase chain reaction (PCR) primer sequences may be used to find other related CA proteins from humans or other organisms. As will be appreciated by those in the art, particularly useful probe and/or PCR primer sequences include the unique areas of the CA nucleic acid sequence. As is generally known in the art, preferred PCR primers are from about 15 to about 35 nucleotides in length, with from about 20 to about 30 being preferred, and may contain inosine as needed. The conditions for the PCR reaction are well known in the art.

[0145] In addition, as is outlined herein, CA proteins can be made that are longer than those encoded by the nucleic acids of the figures, for example, by the elucidation of additional sequences, the addition of epitope or purification tags, the addition of other fusion sequences, etc.

[0146] CA proteins may also be identified as being encoded by CA nucleic acids. Thus, CA proteins are encoded by nucleic acids that will hybridize to the sequences of the sequence listings, or their complements, as outlined herein.

CA Antigens and Antibodies Thereto

[0147] In one embodiment, the invention provides CA specific antibodies. In a preferred embodiment, when the CA protein is to be used to generate antibodies, for example for immunotherapy, the CA protein should share at least one epitope or determinant with the full-length protein. By “epitope” or “determinant” herein is meant a portion of a protein that will generate and/or bind an antibody or T-cell receptor in the context of MHC. Thus, in most instances, antibodies made to a smaller CA protein will be able to bind to the full-length protein. In a preferred embodiment, the epitope is unique; that is, antibodies generated to a unique epitope show little or no cross-reactivity.

[0148] Any polypeptide sequence encoded by the CA polynucleotide sequences may be analyzed to determine certain preferred regions of the polypeptide. Regions of high antigenicity are determined from data by DNASTAR analysis by choosing values that represent regions of the polypeptide that are likely to be exposed on the surface of the polypeptide in an environment in which antigen recognition may occur in the process of initiation of an immune response. For example, the amino acid sequence of a polypeptide encoded by a CA polynucleotide sequence may be analyzed using the default parameters of the DNASTAR computer algorithm (DNASTAR, Inc., Madison, Wis.; http://www.dnastar.com/).

[0149] Polypeptide features that may be routinely obtained using the DNASTAR computer algorithm include, but are not limited to, Garnier-Robson alpha-regions, beta-regions, turn-regions, and coil-regions (Garnier et al. J. Mol. Biol., 120: 97 (1978)); Chou-Fasman alpha-regions, beta-regions, and turn-regions (Adv. in Enzymol., 47:45-148 (1978)); Kyte-Doolittle hydrophilic regions and hydrophobic regions (J. Mol. Biol., 157:105-132 (1982)); Eisenberg alpha- and beta-amphipathic regions; Karplus-Schulz flexible regions; Emini surface-forming regions (J. Virol., 55(3):836-839 (1985)); and Jameson-Wolf regions of high antigenic index (CABIOS, 4(1):181-186 (1988)). Kyte-Doolittle hydrophilic regions and hydrophobic regions, Emini surface-forming regions, and Jameson-Wolf regions of high antigenic index (i.e., containing four or more contiguous amino acids having an antigenic index of greater than or equal to 1.5, as identified using the default parameters of the Jameson-Wolf program) can routinely be used to determine polypeptide regions that exhibit a high degree of potential for antigenicity. One approach for preparing antibodies to a protein is the selection and preparation of an amino acid sequence of all or part of the protein, chemically synthesizing the sequence and injecting it into an appropriate animal, typically a rabbit, hamster or a mouse. Oligopeptides can be selected as candidates for the production of an antibody to the CA protein based upon the oligopeptides lying in hydrophilic regions, which are thus likely to be exposed in the mature protein. Additional oligopeptides can be determined using, for example, the Antigenicity Index, Welling, G. W. et al., FEBS Lett. 188:215-218 (1985), incorporated herein by reference.

[0150] In one embodiment, the term “antibody” includes antibody fragments, as are known in the art, including Fab, Fab₂, single chain antibodies (Fv for example), chimeric antibodies, etc., either produced by the modification of whole antibodies or those synthesized de novo using recombinant DNA technologies.

[0151] Methods of preparing polyclonal antibodies are known to the skilled artisan. Polyclonal antibodies can be raised in a mammal, for example, by one or more injections of an immunizing agent and, if desired, an adjuvant. Typically, the immunizing agent and/or adjuvant will be injected in the mammal by multiple subcutaneous or intraperitoneal injections. The immunizing agent may include a protein encoded by a nucleic acid of the figures or fragment thereof or a fusion protein thereof. It may be useful to conjugate the immunizing agent to a protein known to be immunogenic in the mammal being immunized. Examples of such immunogenic proteins include but are not limited to keyhole limpet hemocyanin, serum albumin, bovine thyroglobulin, and soybean trypsin inhibitor. Examples of adjuvants that may be employed include Freund's complete adjuvant and MPL-TDM adjuvant (monophosphoryl Lipid A, synthetic trehalose dicorynomycolate). The immunization protocol may be selected by one skilled in the art without undue experimentation.

[0152] The antibodies may, alternatively, be monoclonal antibodies. Monoclonal antibodies may be prepared using hybridoma methods, such as those described by Kohler and Milstein, Nature, 256:495 (1975). In a hybridoma method, a mouse, hamster, or other appropriate host animal, is typically immunized with an immunizing agent to elicit lymphocytes that produce or are capable of producing antibodies that will specifically bind to the immunizing agent. Alternatively, the lymphocytes may be immunized in vitro. The immunizing agent will typically include a polypeptide encoded by a nucleic acid of Tables 1-336, or fragment thereof or a fusion protein thereof. Generally, either peripheral blood lymphocytes (“PBLs”) are used if cells of human origin are desired, or spleen cells or lymph node cells are used if non-human mammalian sources are desired. The lymphocytes are then fused with an immortalized cell line using a suitable fusing agent, such as polyethylene glycol, to form a hybridoma cell (Goding, Monoclonal Antibodies: Principles and Practice, Academic Press, (1986) pp. 59-103). Immortalized cell lines are usually transformed mammalian cells, particularly myeloma cells of rodent, bovine and human origin. Usually, rat or mouse myeloma cell lines are employed. The hybridoma cells may be cultured in a suitable culture medium that preferably contains one or more substances that inhibit the growth or survival of the unfused, immortalized cells. For example, if the parental cells lack the enzyme hypoxanthine guanine phosphoribosyl transferase (HGPRT or HPRT), the culture medium for the hybridomas typically will include hypoxanthine, aminopterin, and thymidine (“HAT medium”), which substances prevent the growth of HGPRT-deficient cells.

[0153] Monoclonal antibody technology is used in implementing research, diagnosis and therapy. Monoclonal antibodies are used in radioimmunoassays, enzyme-linked immunosorbent assays, immunocytopathology, and flow cytometry for in vitro diagnosis, and in vivo for diagnosis and immunotherapy of human disease. Waldmann, T. A. (1991) Science 252:1657-1662. In particular, monoclonal antibodies have been widely applied to the diagnosis and therapy of cancer, wherein it is desirable to target malignant lesions while avoiding normal tissue. See, e.g., U.S. Pat. Nos. 4,753,894 to Frankel, et al.; 4,938,948 to Ring et al.; and 4,956,453 to Bjorn et al.

[0154] In one embodiment, the antibodies are bispecific antibodies. Bispecific antibodies are monoclonal, preferably human or humanized, antibodies that have binding specificities for at least two different antigens. A number of “humanized” antibody molecules comprising an antigen-binding site derived from a non-human immunoglobulin have been described, including chimeric antibodies having rodent V regions and their associated CDRs fused to human constant domains (Winter et al. (1991) Nature 349:293-299; Lobuglio et al. (1989) Proc. Nat. Acad. Sci. USA 86:4220-4224; Shaw et al. (1987) J Immunol. 138:4534-4538; and Brown et al. (1987) Cancer Res. 47:3577-3583), rodent CDRs grafted into a human supporting FR prior to fusion with an appropriate human antibody constant domain (Riechmann et al. (1988) Nature 332:323-327; Verhoeyen et al. (1988) Science 239:1534-1536; and Jones et al. (1986) Nature 321:522-525), and rodent CDRs supported by recombinantly veneered rodent FRs (European Patent Publication No. 519,596, published Dec. 23, 1992). These “humanized” molecules are designed to minimize unwanted immunological response toward rodent antihuman antibody molecules which limits the duration and effectiveness of therapeutic applications of those moieties in human recipients. In the present case, one of the binding specificities is for a protein encoded by a nucleic acid of Tables 1-336, or a fragment thereof, the other one is for any other antigen, and preferably for a cell-surface protein or receptor or receptor subunit, preferably one that is tumor specific.

[0155] In a preferred embodiment, the antibodies to CA are capable of reducing or eliminating the biological function of CA, as is described below. That is, the addition of anti-CA antibodies (either polyclonal or preferably monoclonal) to CA (or cells containing CA) may reduce or eliminate the CA activity. Generally, at least a 25% decrease in activity is preferred, with at least about 50% being particularly preferred and about a 95-100% decrease being especially preferred.

[0156] In a preferred embodiment the antibodies to the CA proteins are humanized antibodies. “Humanized” antibodies refer to a molecule having an antigen binding site that is substantially derived from an immunoglobulin from a non-human species and the remaining immunoglobulin structure of the molecule based upon the structure and/or sequence of a human immunoglobulin. The antigen binding site may comprise either complete variable domains fused onto constant domains or only the complementarity determining regions (CDRs) grafted onto appropriate framework regions in the variable domains. Antigen binding sites may be wild type or modified by one or more amino acid substitutions, e.g., modified to resemble human immunoglobulin more closely. Alternatively, a humanized antibody may be derived from a chimeric antibody that retains or substantially retains the antigen-binding properties of the parental, non-human, antibody but which exhibits diminished immunogenicity as compared to the parental antibody when administered to humans. The phrase “chimeric antibody,” as used herein, refers to an antibody containing sequence derived from two different antibodies (see, e.g., U.S. Pat. No. 4,816,567) that typically originate from different species. Typically, in these chimeric antibodies, the variable region of both light and heavy chains mimics the variable regions of antibodies derived from one species of mammals, while the constant portions are homologous to the sequences in antibodies derived from another. Most typically, chimeric antibodies comprise human and murine antibody fragments, generally human constant and mouse variable regions. Humanized antibodies include human immunoglobulins (recipient antibody) in which residues form a complementary determining region (CDR) of the recipient are replaced by residues from a CDR of a non-human species (donor antibody) such as mouse, rat or rabbit having the desired specificity, affinity and capacity. In some instances, Fv framework residues of the human immunoglobulin are replaced by corresponding non-human residues. Humanized antibodies may also comprise residues that are found neither in the recipient antibody nor in the imported CDR or framework sequences. In general, the humanized antibody will comprise substantially all of at least one, and typically two, variable domains, in which all or substantially all of the CDR regions correspond to those of a non-human immunoglobulin and all or substantially all of the framework residues (FR) regions are those of a human immunoglobulin consensus sequence. The humanized antibody optimally also will comprise at least a portion of an immunoglobulin constant region (Fc), typically that of a human immunoglobulin (Jones et al., Nature, 321:522-525 (1986); Riechmann et al., Nature, 332:323-329 (1988); and Presta, Curr. Op. Struct. Biol., 2:593-596 (1992)). One clear advantage to such chimeric forms is that, for example, the variable regions can conveniently be derived from presently known sources using readily available hybridomas or B cells from non human host organisms in combination with constant regions derived from, for example, human cell preparations. While the variable region has the advantage of ease of preparation, and the specificity is not affected by its source, the constant region being human, is less likely to elicit an immune response from a human subject when the antibodies are injected than would the constant region from a non-human source. However, the definition is not limited to this particular example.

[0157] Because humanized antibodies are far less immunogenic in humans than the parental mouse monoclonal antibodies, they can be used for the treatment of humans with far less risk of anaphylaxis. Thus, these antibodies may be preferred in therapeutic applications that involve in vivo administration to a human such as, e.g., use as radiation sensitizers for the treatment of neoplastic disease or use in methods to reduce the side effects of, e.g., cancer therapy. Methods for humanizing non-human antibodies are well known in the art. Generally, a humanized antibody has one or more amino acid residues introduced into it from a source that is non-human. These non-human amino acid residues are often referred to as import residues, which are typically taken from an import variable domain. Humanization can be essentially performed following the method of Winter and co-workers (Jones et al., Nature 321:522-525 (1986); Riechmann et al., Nature 332:323-327 (1988); Verhoeyen et al., Science 239:1534-1536 (1988)), by substituting rodent CDRs or CDR sequences for the corresponding sequences of a human antibody. Accordingly, such humanized antibodies are chimeric antibodies (U.S. Pat. No. 4,816,567), wherein substantially less than an intact human variable domain has been substituted by the corresponding sequence from a non-human species. In practice, humanized antibodies are typically human antibodies in which some CDR residues and possibly some FR residues are substituted by residues from analogous sites in rodent antibodies.

[0158] Human antibodies can also be produced using various techniques known in the art, including phage display libraries [Hoogenboom and Winter, J. Mol. Biol., 227:381 (1991); Marks et al., J. Mol. Biol., 222:581 (1991)]. The techniques of Cole et al. and Boerner et al. are also available for the preparation of human monoclonal antibodies [Cole et al., Monoclonal Antibodies and Cancer Therapy, Alan R. Liss, p. 77 (1985) and Boerner et al., J. Immunol., 147(1):86-95 (1991)]. Humanized antibodies may be achieved by a variety of methods including, for example: (1) grafting the non-human complementarity determining regions (CDRs) onto a human framework and constant region (a process referred to in the art as “humanizing”), or, alternatively, (2) transplanting the entire non-human variable domains, but “cloaking” them with a humanlike surface by replacement of surface residues (a process referred to in the art as “veneering”). In the present invention, humanized antibodies will include both “humanized” and “veneered” antibodies. Similarly, human antibodies can be made by introducing human immunoglobulin loci into transgenic animals, e.g., mice in which the endogenous immunoglobulin genes have been partially or completely inactivated. Upon challenge, human antibody production is observed, which closely resembles that seen in humans in all respects, including gene rearrangement, assembly, and antibody repertoire. This approach is described, for example, in U.S. Pat. Nos. 5,545,807; 5,545,806; 5,569,825; 5,625,126; 5,633,425; 5,661,016, and in the following scientific publications: Marks et al., Bio/Technology 10, 779-783 (1992); Lonberg et al., Nature 368 856-859 (1994); Morrison, Nature 368, 812-13 (1994); Fishwild et al., Nature Biotechnology 14, 845-51 (1996); Neuberger, Nature Biotechnology 14, 826 (1996); Lonberg and Huszar, Intern. Rev. Immunol. 13 65-93 (1995); Jones et al., Nature 321:522-525 (1986); Morrison et al., Proc. Natl. Acad. Sci, U.S.A., 81:6851-6855 (1984); Morrison and Oi, Adv. Immunol., 44:65-92 (1988); Verhoeyer et al., Science 239:1534-1536 (1988); Padlan, Molec. Immun. 28:489-498 (1991); Padlan, Molec. Immunol. 31(3):169-217 (1994); and Kettleborough, C. A. et al., Protein Eng. 4(7):773-83 (1991) each of which is incorporated herein by reference.

[0159] The phrase “complementarity determining region” refers to amino acid sequences which together define the binding affinity and specificity of the natural Fv region of a native immunoglobulin binding site. See, e.g., Chothia et al., J. Mol. Biol. 196:901-917 (1987); Kabat et al., U.S. Dept. of Health and Human Services NIH Publication No. 91-3242 (1991). The phrase “constant region” refers to the portion of the antibody molecule that confers effector functions. In the present invention, mouse constant regions are substituted by human constant regions. The constant regions of the subject humanized antibodies are derived from human immunoglobulins. The heavy chain constant region can be selected from any of the five isotypes: alpha, delta, epsilon, gamma or mu. One method of humanizing antibodies comprises aligning the non-human heavy and light chain sequences to human heavy and light chain sequences, selecting and replacing the non-human framework with a human framework based on such alignment, molecular modeling to predict the conformation of the humanized sequence and comparing to the conformation of the parent antibody. This process is followed by repeated back mutation of residues in the CDR region that disturb the structure of the CDRs until the predicted conformation of the humanized sequence model closely approximates the conformation of the non-human CDRs of the parent non-human antibody. Such humanized antibodies may be further derivatized to facilitate uptake and clearance, e.g., via Ashwell receptors. See, e.g., U.S. Pat. Nos. 5,530,101 and 5,585,089 which are incorporated herein by reference.

[0160] Humanized antibodies to CA polypeptides can also be produced using transgenic animals that are engineered to contain human immunoglobulin loci. For example, WO 98/24893 discloses transgenic animals having a human Ig locus wherein the animals do not produce functional endogenous immunoglobulins due to the inactivation of endogenous heavy and light chain loci. WO 91/10741 also discloses transgenic non-primate mammalian hosts capable of mounting an immune response to an immunogen, wherein the antibodies have primate constant and/or variable regions, and wherein the endogenous immunoglobulin-encoding loci are substituted or inactivated. WO 96/30498 discloses the use of the Cre/Lox system to modify the immunoglobulin locus in a mammal, such as to replace all or a portion of the constant or variable region to form a modified antibody molecule. WO 94/02602 discloses non-human mammalian hosts having inactivated endogenous Ig loci and functional human Ig loci. U.S. Pat. No. 5,939,598 discloses methods of making transgenic mice in which the mice lack endogenous heavy chains, and express an exogenous immunoglobulin locus comprising one or more xenogeneic constant regions.

[0161] Using a transgenic animal described above, an immune response can be produced to a selected antigenic molecule, and antibody-producing cells can be removed from the animal and used to produce hybridomas that secrete human monoclonal antibodies. Immunization protocols, adjuvants, and the like are known in the art, and are used in immunization of, for example, a transgenic mouse as described in WO 96/33735. The monoclonal antibodies can be tested for the ability to inhibit or neutralize the biological activity or physiological effect of the corresponding protein.

[0162] In the present invention, CA polypeptides of the invention and variants thereof are used to immunize a transgenic animal as described above. Monoclonal antibodies are made using methods known in the art, and the specificity of the antibodies is tested using isolated CA polypeptides. Methods for preparation of the human or primate CA or an epitope thereof include, but are not limited to chemical synthesis, recombinant DNA techniques or isolation from biological samples. Chemical synthesis of a peptide can be performed, for example, by the classical Merrifeld method of solid phase peptide synthesis (Merrifeld, J. Am. Chem. Soc. 85:2149, 1963 which is incorporated by reference) or the FMOC strategy on a Rapid Automated Multiple Peptide Synthesis system (E. I. du Pont de Nemours Company, Wilmington, Del.) (Caprino and Han, J. Org. Chem. 37:3404, 1972 which is incorporated by reference).

[0163] Polyclonal antibodies can be prepared by immunizing rabbits or other animals by injecting antigen followed by subsequent boosts at appropriate intervals. The animals are bled and sera assayed against purified CA proteins usually by ELISA or by bioassay based upon the ability to block the action of CA proteins. When using avian species, e.g., chicken, turkey and the like, the antibody can be isolated from the yolk of the egg. Monoclonal antibodies can be prepared after the method of Milstein and Kohler by fusing splenocytes from immunized mice with continuously replicating tumor cells such as myeloma or lymphoma cells. (Milstein and Kohler, Nature 256:495-497, 1975; Gulfre and Milstein, Methods in Enzymology: Immunochemical Techniques 73:1-46, Langone and Banatis eds., Academic Press, 1981 which are incorporated by reference). The hybridoma cells so formed are then cloned by limiting dilution methods and supernates assayed for antibody production by ELISA, RIA or bioassay.

[0164] The unique ability of antibodies to recognize and specifically bind to target proteins provides an approach for treating an overexpression of the protein. Thus, another aspect of the present invention provides for a method for preventing or treating diseases involving overexpression of a CA polypeptide by treatment of a patient with specific antibodies to the CA protein.

[0165] Specific antibodies, either polyclonal or monoclonal, to the CA proteins can be produced by any suitable method known in the art as discussed above. For example, murine or human monoclonal antibodies can be produced by hybridoma technology or, alternatively, the CA proteins, or an immunologically active fragment thereof, or an anti-idiotypic antibody, or fragment thereof can be administered to an animal to elicit the production of antibodies capable of recognizing and binding to the CA proteins. Such antibodies can be from any class of antibodies including, but not limited to IgG, IgA, IgM, IgD, and IgE or in the case of avian species, IgY and from any subclass of antibodies.

[0166] By immunotherapy is meant treatment of a cancer with an antibody raised against a CA protein. As used herein, immunotherapy can be passive or active. Passive immunotherapy as defined herein is the passive transfer of antibody to a recipient (patient). Active immunization is the induction of antibody and/or T-cell responses in a recipient (patient). Induction of an immune response is the result of providing the recipient with an antigen to which antibodies are raised. As appreciated by one of ordinary skill in the art, the antigen may be provided by injecting a polypeptide against which antibodies are desired to be raised into a recipient, or contacting the recipient with a nucleic acid capable of expressing the antigen and under conditions for expression of the antigen.

[0167] In a preferred embodiment, oncogenes which encode secreted growth factors may be inhibited by raising antibodies against CA proteins that are secreted proteins as described above. Without being bound by theory, antibodies used for treatment, bind and prevent the secreted protein from binding to its receptor, thereby inactivating the secreted CA protein.

[0168] In another preferred embodiment, the CA protein to which antibodies are raised is a transmembrane protein. Without being bound by theory, antibodies used for treatment, bind the extracellular domain of the CA protein and prevent it from binding to other proteins, such as circulating ligands or cell-associated molecules. The antibody may cause down-regulation of the transmembrane CA protein. As will be appreciated by one of ordinary skill in the art, the antibody may be a competitive, non-competitive or uncompetitive inhibitor of protein binding to the extracellular domain of the CA protein. The antibody is also an antagonist of the CA protein. Further, the antibody prevents activation of the transmembrane CA protein. In one aspect, when the antibody prevents the binding of other molecules to the CA protein, the antibody prevents growth of the cell. The antibody may also sensitize the cell to cytotoxic agents, including, but not limited to TNF-α, TNF-β, IL-1, INF-γ and IL-2, or chemotherapeutic agents including 5FU, vinblastine, actinomycin D, cisplatin, methotrexate, and the like. In some instances the antibody belongs to a sub-type that activates serum complement when complexed with the transmembrane protein thereby mediating cytotoxicity. Thus, cancers may be treated by administering to a patient antibodies directed against the transmembrane CA protein.

[0169] In another preferred embodiment, the antibody is conjugated to a therapeutic moiety. In one aspect the therapeutic moiety is a small molecule that modulates the activity of the CA protein. In another aspect the therapeutic moiety modulates the activity of molecules associated with or in close proximity to the CA protein. The therapeutic moiety may inhibit enzymatic activity such as protease or protein kinase activity associated with cancer.

[0170] In a preferred embodiment, the therapeutic moiety may also be a cytotoxic agent. In this method, radioisotopes, natural toxins, chemotherapy agents, or other substances (such as biological response modifiers) are chemically linked or conjugated to a monoclonal antibody to form “immunoconjugates” and “immunotoxins” which target the cytotoxic agent to tumor tissue or cells resulting in a reduction in the number of afflicted cells, thereby reducing symptoms associated with cancers, including lymphoma. Cytotoxic agents are numerous and varied and include, but are not limited to, cytotoxic drugs or toxins or active fragments of such toxins. Suitable toxins and their corresponding fragments include diphtheria A chain, exotoxin A chain, ricin A chain, abrin A chain, curcin, crotin, phenomycin, enomycin and the like. Cytotoxic agents also include radiochemicals made by conjugating radioisotopes to antibodies raised against CA proteins, or binding of a radionuclide to a chelating agent that has been covalently attached to the antibody. Targeting the therapeutic moiety to transmembrane CA proteins not only serves to increase the local concentration of therapeutic moiety in the cancer of interest, i.e., lymphoma, but also serves to reduce deleterious side effects that may be associated with the therapeutic moiety. A number of investigators have used monoclonal antibodies as carriers of cytotoxic substances in attempts to selectively direct those agents to malignant tissue. More particularly, a number of monoclonal antibodies have been conjugated to toxins such as ricin, abrin, diphtheria toxin and Pseudomonas exotoxin or to enzymatically active portions (A chains) thereof via heterobifunctional agents. See, e.g., U.S. Pat. No. 4,753,894 to Frankel et al.; Nevelle, et al. (1982) Immunol Rev 62:75-91; Ross et al. (1980) Eur. J. Biochem 104; Vitteta et al. (1982) Immunol Rev 62:158-183; Raso et al. (1982) Cancer Res 42:457-464, and Trowbridge et al. (1981) Nature 294:171-173.

[0171] In another preferred embodiment, the CA protein against which the antibodies are raised is an intracellular protein. In this case, the antibody may be conjugated to a protein that facilitates entry into the cell. In one case, the antibody enters the cell by endocytosis. In another embodiment, a nucleic acid encoding the antibody is administered to the individual or cell. Moreover, wherein the CA protein can be targeted within a cell, e.g., the nucleus, an antibody thereto contains a signal for that target localization, e.g., a nuclear localization signal.

[0172] The CA antibodies of the invention specifically bind to CA proteins. By “specifically bind” herein is meant that the antibodies bind to the protein with a binding constant in the range of 10⁻⁴-10⁻⁶ M⁻¹, with a preferred range being 10⁷-10⁻⁹ M⁻¹.

[0173] In a preferred embodiment, the CA protein is purified or isolated after expression. CA proteins may be isolated or purified in a variety of ways known to those skilled in the art depending on what other components are present in the sample. Standard purification methods include electrophoretic, molecular, immunological and chromatographic techniques, including ion exchange, hydrophobic, affinity, and reverse-phase HPLC chromatography, and chromatofocusing. For example, the CA protein may be purified using a standard anti-CA antibody column. Ultrafiltration and diafiltration techniques, in conjunction with protein concentration, are also useful. For general guidance in suitable purification techniques, see Scopes, R., Protein Purification, Springer-Verlag, NY (1982). The degree of purification necessary will vary depending on the use of the CA protein. In some instances no purification will be necessary.

Detection of Cancer Phenotype

[0174] Once expressed and purified if necessary, the CA proteins and nucleic acids are useful in a number of applications. In one aspect, the expression levels of genes are determined for different cellular states in the cancer phenotype; that is, the expression levels of genes in normal tissue and in cancer tissue (and in some cases, for varying severities of lymphoma that relate to prognosis, as outlined below) are evaluated to provide expression profiles. An expression profile of a particular cell state or point of development is essentially a “fingerprint” of the state; while two states may have any particular gene similarly expressed, the evaluation of a number of genes simultaneously allows the generation of a gene expression profile that is unique to the state of the cell. By comparing expression profiles of cells in different states, information regarding which genes are important (including both up- and down-regulation of genes) in each of these states is obtained. Then, diagnosis may be done or confirmed: does tissue from a particular patient have the gene expression profile of normal or cancer tissue.

[0175] “Differential expression,” or equivalents used herein, refers to both qualitative as well as quantitative differences in the temporal and/or cellular expression patterns of genes, within and among the cells. Thus, a differentially expressed gene can qualitatively have its expression altered, including an activation or inactivation, in, for example, normal versus cancer tissue. That is, genes may be turned on or turned off in a particular state, relative to another state. As is apparent to the skilled artisan, any comparison of two or more states can be made. Such a qualitatively regulated gene will exhibit an expression pattern within a state or cell type which is detectable by standard techniques in one such state or cell type, but is not detectable in both. Alternatively, the determination is quantitative in that expression is increased or decreased; that is, the expression of the gene is either up-regulated, resulting in an increased amount of transcript, or down-regulated, resulting in a decreased amount of transcript. The degree to which expression differs need only be large enough to quantify via standard characterization techniques as outlined below, such as by use of Affymetrix GeneChip® expression arrays, Lockhart, Nature Biotechnology, 14:1675-1680 (1996), hereby expressly incorporated by reference. Other techniques include, but are not limited to, quantitative reverse transcriptase PCR, Northern analysis and RNase protection. As outlined above, preferably the change in expression (i.e. upregulation or downregulation) is at least about 50%, more preferably at least about 100%, more preferably at least about 150%, more preferably, at least about 200%, with from 300 to at least 1000% being especially preferred.

[0176] As will be appreciated by those in the art, this may be done by evaluation at either the gene transcript, or the protein level; that is, the amount of gene expression may be monitored using nucleic acid probes to the DNA or RNA equivalent of the gene transcript, and the quantification of gene expression levels, or, alternatively, the final gene product itself (protein) can be monitored, for example through the use of antibodies to the CA protein and standard immunoassays (ELISAs, etc.) or other techniques, including mass spectroscopy assays, 2D gel electrophoresis assays, etc. Thus, the proteins corresponding to CA genes, i.e. those identified as being important in a particular cancer phenotype, i.e., lymphoma, can be evaluated in a diagnostic test specific for that cancer.

[0177] In a preferred embodiment, gene expression monitoring is done and a number of genes, i.e. an expression profile, is monitored simultaneously, although multiple protein expression monitoring can be done as well. Similarly, these assays may be done on an individual basis as well.

[0178] In this embodiment, the CA nucleic acid probes may be attached to biochips as outlined herein for the detection and quantification of CA sequences in a particular cell. The assays are done as is known in the art. As will be appreciated by those in the art, any number of different CA sequences may be used as probes, with single sequence assays being used in some cases, and a plurality of the sequences described herein being used in other embodiments. In addition, while solid-phase assays are described, any number of solution based assays may be done as well.

[0179] In a preferred embodiment, both solid and solution based assays may be used to detect CA sequences that are up-regulated or down-regulated in cancers as compared to normal tissue. In instances where the CA sequence has been altered but shows the same expression profile or an altered expression profile, the protein will be detected as outlined herein.

[0180] In a preferred embodiment nucleic acids encoding the CA protein are detected. Although DNA or RNA encoding the CA protein may be detected, of particular interest are methods wherein the mRNA encoding a CA protein is detected. The presence of mRNA in a sample is an indication that the CA gene has been transcribed to form the mRNA, and suggests that the protein is expressed. Probes to detect the mRNA can be any nucleotide/deoxynucleotide probe that is complementary to and base pairs with the mRNA and includes but is not limited to oligonucleotides, cDNA or RNA. Probes also should contain a detectable label, as defined herein. In one method the mRNA is detected after immobilizing the nucleic acid to be examined on a solid support such as nylon membranes and hybridizing the probe with the sample. Following washing to remove the non-specifically bound probe, the label is detected. In another method detection of the mRNA is performed in situ. In this method permeabilized cells or tissue samples are contacted with a detectably labeled nucleic acid probe for sufficient time to allow the probe to hybridize with the target mRNA. Following washing to remove the non-specifically bound probe, the label is detected. For example a digoxygenin labeled riboprobe (RNA probe) that is complementary to the mRNA encoding a CA protein is detected by binding the digoxygenin with an anti-digoxygenin secondary antibody and developed with nitro blue tetrazolium and 5-bromo-4-chloro-3-indoyl phosphate.

[0181] In a preferred embodiment, any of the three classes of proteins as described herein (secreted, transmembrane or intracellular proteins) are used in diagnostic assays. The CA proteins, antibodies, nucleic acids, modified proteins and cells containing CA sequences are used in diagnostic assays. This can be done on an individual gene or corresponding polypeptide level, or as sets of assays.

[0182] As described and defined herein, CA proteins find use as markers of cancers, including lymphomas such as, but not limited to, Hodgkin's and non-Hodgkin's lymphoma. Detection of these proteins in putative cancer tissue or patients allows for a determination or diagnosis of the type of cancer. Numerous methods known to those of ordinary skill in the art find use in detecting cancers. In one embodiment, antibodies are used to detect CA proteins. A preferred method separates proteins from a sample or patient by electrophoresis on a gel (typically a denaturing and reducing protein gel, but may be any other type of gel including isoelectric focusing gels and the like). Following separation of proteins, the CA protein is detected by immunoblotting with antibodies raised against the CA protein. Methods of immunoblotting are well known to those of ordinary skill in the art.

[0183] In another preferred method, antibodies to the CA protein find use in in situ imaging techniques. In this method cells are contacted with from one to many antibodies to the CA protein(s). Following washing to remove non-specific antibody binding, the presence of the antibody or antibodies is detected. In one embodiment the antibody is detected by incubating with a secondary antibody that contains a detectable label. In another method the primary antibody to the CA protein(s) contains a detectable label. In another preferred embodiment each one of multiple primary antibodies contains a distinct and detectable label. This method finds particular use in simultaneous screening for a plurality of CA proteins. As will be appreciated by one of ordinary skill in the art, numerous other histological imaging techniques are useful in the invention.

[0184] In a preferred embodiment the label is detected in a fluorometer that has the ability to detect and distinguish emissions of different wavelengths. In addition, a fluorescence activated cell sorter (FACS) can be used in the method.

[0185] In another preferred embodiment, antibodies find use in diagnosing cancers from blood samples. As previously described, certain CA proteins are secreted/circulating molecules. Blood samples, therefore, are useful as samples to be probed or tested for the presence of secreted CA proteins. Antibodies can be used to detect the CA proteins by any of the previously described immunoassay techniques including ELISA, immunoblotting (Western blotting), immunoprecipitation, BIACORE technology and the like, as will be appreciated by one of ordinary skill in the art.

[0186] In a preferred embodiment, in situ hybridization of labeled CA nucleic acid probes to tissue arrays is done. For example, arrays of tissue samples, including CA tissue and/or normal tissue, are made. In situ hybridization as is known in the art can then be done.

[0187] It is understood that when comparing the expression fingerprints between an individual and a standard, the skilled artisan can make a diagnosis as well as a prognosis. It is further understood that the genes that indicate diagnosis may differ from those that indicate prognosis.

[0188] In a preferred embodiment, the CA proteins, antibodies, nucleic acids, modified proteins and cells containing CA sequences are used in prognosis assays. As above, gene expression profiles can be generated that correlate to cancer, especially lymphoma, severity, in terms of long term prognosis. Again, this may be done on either a protein or gene level, with the use of genes being preferred. As above, the CA probes are attached to biochips for the detection and quantification of CA sequences in a tissue or patient. The assays proceed as outlined for diagnosis.

Screening for CA-Targeted Drugs

[0189] In one embodiment, any of the CA sequences as described herein are used in drug screening assays. The CA proteins, antibodies, nucleic acids, modified proteins and cells containing CA sequences are used in drug screening assays or by evaluating the effect of drug candidates on a “gene expression profile” or expression profile of polypeptides. In one embodiment, the expression profiles are used, preferably in conjunction with high throughput screening techniques to allow monitoring for expression profile genes after treatment with a candidate agent, Zlokarnik, et al., Science 279, 84-8 (1998), Heid, et al., Genome Res., 6:986-994 (1996).

[0190] In another embodiment, the CA proteins, antibodies, nucleic acids, modified proteins and cells containing the native or modified CA proteins are used in screening assays. That is, the present invention provides novel methods for screening for compositions that modulate the cancer phenotype. As above, this can be done by screening for modulators of gene expression or for modulators of protein activity. Similarly, this may be done on an individual gene or protein level or by evaluating the effect of drug candidates on a “gene expression profile”. In a preferred embodiment, the expression profiles are used, preferably in conjunction with high throughput screening techniques to allow monitoring for expression profile genes after treatment with a candidate agent, see Zlokarnik, supra.

[0191] Having identified the CA genes herein, a variety of assays to evaluate the effects of agents on gene expression may be executed. In a preferred embodiment, assays may be run on an individual gene or protein level. That is, having identified a particular gene as aberrantly regulated in cancer, candidate bioactive agents may be screened to modulate the gene's regulation. “Modulation” thus includes both an increase and a decrease in gene expression or activity. The preferred amount of modulation will depend on the original change of the gene expression in normal versus tumor tissue, with changes of at least 10%, preferably 50%, more preferably 100-300%, and in some embodiments 300-1000% or greater. Thus, if a gene exhibits a 4 fold increase in tumor compared to normal tissue, a decrease of about four fold is desired; a 10 fold decrease in tumor compared to normal tissue gives a 10 fold increase in expression for a candidate agent is desired, etc. Alternatively, where the CA sequence has been altered but shows the same expression profile or an altered expression profile, the protein will be detected as outlined herein.

[0192] As will be appreciated by those in the art, this may be done by evaluation at either the gene or the protein level; that is, the amount of gene expression may be monitored using nucleic acid probes and the quantification of gene expression levels, or, alternatively, the level of the gene product itself can be monitored, for example through the use of antibodies to the CA protein and standard immunoassays. Alternatively, binding and bioactivity assays with the protein may be done as outlined below.

[0193] In a preferred embodiment, gene expression monitoring is done and a number of genes, i.e. an expression profile, is monitored simultaneously, although multiple protein expression monitoring can be done as well.

[0194] In this embodiment, the CA nucleic acid probes are attached to biochips as outlined herein for the detection and quantification of CA sequences in a particular cell. The assays are further described below.

[0195] Generally, in a preferred embodiment, a candidate bioactive agent is added to the cells prior to analysis. Moreover, screens are provided to identify a candidate bioactive agent that modulates a particular type of cancer, modulates CA proteins, binds to a CA protein, or interferes between the binding of a CA protein and an antibody.

[0196] The term “candidate bioactive agent” or “drug candidate” or grammatical equivalents as used herein describes any molecule, e.g., protein, oligopeptide, small organic or inorganic molecule, polysaccharide, polynucleotide, etc., to be tested for bioactive agents that are capable of directly or indirectly altering either the cancer phenotype, binding to and/or modulating the bioactivity of a CA protein, or the expression of a CA sequence, including both nucleic acid sequences and protein sequences. In a particularly preferred embodiment, the candidate agent suppresses a CA phenotype, for example to a normal tissue fingerprint. Similarly, the candidate agent preferably suppresses a severe CA phenotype. Generally a plurality of assay mixtures are run in parallel with different agent concentrations to obtain a differential response to the various concentrations. Typically, one of these concentrations serves as a negative control, i.e., at zero concentration or below the level of detection.

[0197] In one aspect, a candidate agent will neutralize the effect of a CA protein. By “neutralize” is meant that activity of a protein is either inhibited or counter acted against so as to have substantially no effect on a cell.

[0198] Candidate agents encompass numerous chemical classes, though typically they are organic or inorganic molecules, preferably small organic compounds having a molecular weight of more than 100 and less than about 2,500 Daltons. Preferred small molecules are less than 2000, or less than 1500 or less than 1000 or less than 500 D. Candidate agents comprise functional groups necessary for structural interaction with proteins, particularly hydrogen bonding, and typically include at least an amine, carbonyl, hydroxyl or carboxyl group, preferably at least two of the functional chemical groups. The candidate agents often comprise cyclical carbon or heterocyclic structures and/or aromatic or polyaromatic structures substituted with one or more of the above functional groups. Candidate agents are also found among biomolecules including peptides, saccharides, fatty acids, steroids, purines, pyrimidines, derivatives, structural analogs or combinations thereof. Particularly preferred are peptides.

[0199] Candidate agents are obtained from a wide variety of sources including libraries of synthetic or natural compounds. For example, numerous means are available for random and directed synthesis of a wide variety of organic compounds and biomolecules, including expression of randomized oligonucleotides. Alternatively, libraries of natural compounds in the form of bacterial, fungal, plant and animal extracts are available or readily produced. Additionally, natural or synthetically produced libraries and compounds are readily modified through conventional chemical, physical and biochemical means. Known pharmacological agents may be subjected to directed or random chemical modifications, such as acylation, alkylation, esterification, or amidification to produce structural analogs.

[0200] In one embodiment, the candidate bioactive agents are proteins. By “protein” herein is meant at least two covalently attached amino acids, which includes proteins, polypeptides, oligopeptides and peptides. The protein may be made up of naturally occurring amino acids and peptide bonds, or synthetic peptidomimetic structures. Thus “amino acid”, or “peptide residue”, as used herein means both naturally occurring and synthetic amino acids. For example, homo-phenylalanine, citrulline and norleucine are considered amino acids for the purposes of the invention. “Amino acid” also includes imino acid residues such as proline and hydroxyproline. The side chains may be in either the (R) or the (S) configuration. In the preferred embodiment, the amino acids are in the (S) or L-configuration. If non-naturally occurring side chains are used, non-amino acid substituents may be used, for example to prevent or retard in vivo degradations.

[0201] In a preferred embodiment, the candidate bioactive agents are naturally occurring proteins or fragments of naturally occurring proteins. Thus, for example, cellular extracts containing proteins, or random or directed digests of proteinaceous cellular extracts, may be used. In this way libraries of prokaryotic and eukaryotic proteins may be made for screening in the methods of the invention. Particularly preferred in this embodiment are libraries of bacterial, fungal, viral, and mammalian proteins, with the latter being preferred, and human proteins being especially preferred.

[0202] In another preferred embodiment, the candidate bioactive agents are peptides of from about 5 to about 30 amino acids, with from about 5 to about 20 amino acids being preferred, and from about 7 to about 15 being particularly preferred. The peptides may be digests of naturally occurring proteins as is outlined above, random peptides, or “biased” random peptides. By “randomized” or grammatical equivalents herein is meant that each nucleic acid and peptide consists of essentially random nucleotides and amino acids, respectively. Since generally these random peptides (or nucleic acids, discussed below) are chemically synthesized, they may incorporate any nucleotide or amino acid at any position. The synthetic process can be designed to generate randomized proteins or nucleic acids, to allow the formation of all or most of the possible combinations over the length of the sequence, thus forming a library of randomized candidate bioactive proteinaceous agents.

[0203] In one embodiment, the library is fully randomized, with no sequence preferences or constants at any position. In a preferred embodiment, the library is biased. That is, some positions within the sequence are either held constant, or are selected from a limited number of possibilities. For example, in a preferred embodiment, the nucleotides or amino acid residues are randomized within a defined class, for example, of hydrophobic amino acids, hydrophilic residues, sterically biased (either small or large) residues, towards the creation of nucleic acid binding domains, the creation of cysteines, for cross-linking, prolines for SH-3 domains, serines, threonines, tyrosines or histidines for phosphorylation sites, etc., or to purines, etc.

[0204] In one embodiment, the candidate bioactive agents are nucleic acids. As described generally for proteins, nucleic acid candidate bioactive agents may be naturally occurring nucleic acids, random nucleic acids, or “biased” random nucleic acids. In another embodiment, the candidate bioactive agents are organic chemical moieties, a wide variety of which are available in the literature.

[0205] In assays for testing alteration of the expression profile of one or more CA genes, after the candidate agent has been added and the cells allowed to incubate for some period of time, a nucleic acid sample containing the target sequences to be analyzed is prepared. The target sequence is prepared using known techniques (e.g., converted from RNA to labeled cDNA, as described above) and added to a suitable microarray. For example, an in vitro reverse transcription with labels covalently attached to the nucleosides is performed. Generally, the nucleic acids are labeled with a label as defined herein, especially with biotin-FITC or PE, Cy3 and Cy5.

[0206] As will be appreciated by those in the art, these assays can be direct hybridization assays or can comprise “sandwich assays”, which include the use of multiple probes, as is generally outlined in U.S. Pat. Nos. 5,681,702, 5,597,909, 5,545,730, 5,594,117, 5,591,584, 5,571,670, 5,580,731, 5,571,670, 5,591,584, 5,624,802, 5,635,352, 5,594,118, 5,359,100, 5,124,246 and 5,681,697, all of which are hereby incorporated by reference. In this embodiment, in general, the target nucleic acid is prepared as outlined above, and then added to the biochip comprising a plurality of nucleic acid probes, under conditions that allow the formation of a hybridization complex.

[0207] A variety of hybridization conditions may be used in the present invention, including high, moderate and low stringency conditions as outlined above. The assays are generally run under stringency conditions that allow formation of the label probe hybridization complex only in the presence of target. Stringency can be controlled by altering a step parameter that is a thermodynamic variable, including, but not limited to, temperature, formamide concentration, salt concentration, chaotropic salt concentration, pH, organic solvent concentration, etc. These parameters may also be used to control non-specific binding, as is generally outlined in U.S. Pat. No. 5,681,697. Thus it may be desirable to perform certain steps at higher stringency conditions to reduce non-specific binding.

[0208] The reactions outlined herein may be accomplished in a variety of ways, as will be appreciated by those in the art. Components of the reaction may be added simultaneously, or sequentially, in any order, with preferred embodiments outlined below. In addition, the reaction may include a variety of other reagents in the assays. These include reagents like salts, buffers, neutral proteins, e.g. albumin, detergents, etc which may be used to facilitate optimal hybridization and detection, and/or reduce non-specific or background interactions. Also reagents that otherwise improve the efficiency of the assay, such as protease inhibitors, nuclease inhibitors, anti-microbial agents, etc., may be used, depending on the sample preparation methods and purity of the target. In addition, either solid phase or solution based (i.e., kinetic PCR) assays may be used.

[0209] Once the assay is run, the data are analyzed to determine the expression levels, and changes in expression levels as between states, of individual genes, forming a gene expression profile.

[0210] In a preferred embodiment, as for the diagnosis and prognosis applications, having identified the differentially expressed gene(s) or mutated gene(s) important in any one state, screens can be run to test for alteration of the expression of the CA genes individually. That is, screening for modulation of regulation of expression of a single gene can be done. Thus, for example, in the case of target genes whose presence or absence is unique between two states, screening is done for modulators of the target gene expression.

[0211] In addition, screens can be done for novel genes that are induced in response to a candidate agent. After identifying a candidate agent based upon its ability to suppress a CA expression pattern leading to a normal expression pattern, or modulate a single CA gene expression profile so as to mimic the expression of the gene from normal tissue, a screen as described above can be performed to identify genes that are specifically modulated in response to the agent. Comparing expression profiles between normal tissue and agent treated CA tissue reveals genes that are not expressed in normal tissue or CA tissue, but are expressed in agent treated tissue. These agent specific sequences can be identified and used by any of the methods described herein for CA genes or proteins. In particular these sequences and the proteins they encode find use in marking or identifying agent-treated cells. In addition, antibodies can be raised against the agent-induced proteins and used to target novel therapeutics to the treated CA tissue sample.

[0212] Thus, in one embodiment, a candidate agent is administered to a population of CA cells, that thus has an associated CA expression profile. By “administration” or “contacting” herein is meant that the candidate agent is added to the cells in such a manner as to allow the agent to act upon the cell, whether by uptake and intracellular action, or by action at the cell surface. In some embodiments, nucleic acid encoding a proteinaceous candidate agent (i.e. a peptide) may be put into a viral construct such as a retroviral construct and added to the cell, such that expression of the peptide agent is accomplished; see PCT US97/01019, hereby expressly incorporated by reference.

[0213] Once the candidate agent has been administered to the cells, the cells can be washed if desired and are allowed to incubate under preferably physiological conditions for some period of time. The cells are then harvested and a new gene expression profile is generated, as outlined herein.

[0214] Thus, for example, CA tissue may be screened for agents that reduce or suppress the CA phenotype. A change in at least one gene of the expression profile indicates that the agent has an effect on CA activity. By defining such a signature for the CA phenotype, screens for new drugs that alter the phenotype can be devised. With this approach, the drug target need not be known and need not be represented in the original expression screening platform, nor does the level of transcript for the target protein need to change.

[0215] In a preferred embodiment, as outlined above, screens may be done on individual genes and gene products (proteins). That is, having identified a particular differentially expressed gene as important in a particular state, screening of modulators of either the expression of the gene or the gene product itself can be done. The gene products of differentially expressed genes are sometimes referred to herein as “CA proteins” or “CAP”. The CAP may be a fragment, or alternatively, be the full-length protein to the fragment encoded by the nucleic acids of Tables 1-336 (human genomic sequences of SEQ ID NOS: 12, 20, 30, 48, 58, 76, 86, 94, 112, 126, 146, 154, 160, 180, 206, 216, 224, 236, 244, 252, 260, 272, 284, 300, 306, 316, 326, 332, 343, 363, 375, 395, 407, 415, 425, 431, 447, 458, 468, 476, 482, 490, 502, 516, 530, 540, 548, 554, 572, 588, 596, 604, 612, 620, 626, 636, 642, 667, 673, 679, 687, 696, 702, 708, 716, 726, 738, 748, 756, 764, 772, 782, 792, 802, 820, 830, 848, 866, 874, 894, 900, 908, 918, 926, 936, 942, 950, 960, 968, 980, 998, 1012, 1026, 1034, 1048, 1057, 1077, 1087, 1095, 1101, 1107, 1121, 1127, 1133, 1141, 1149, 1155, 1165, 1173, 1183, 1191, 1207, 1217, 1225, 1237, 1243, 1253, 1271, 1287, 1301, 1309, 1327, 1333, 1347, 1355, 1361, 1367, 1379, 1389, 1397, 1400, 1416, 1436, 1456, 1462, 1474, 1482, 1490, 1499, 1507, 1515, 1533, 1539, 1549, 1559, 1571, 1579, 1589, 1603, 1619, 1625, 1633, 1643, 1649, 1657, 1669, 1675, 1685, 1691, 1699, 1711, 1719, 1731, 1743, 1751, 1764, 1772, 1793, 1799, 1811, 1817, 1829, 1839, 1849, 1855, 1863, 1869, 1877, 1883, 1893, 1909, 1923, 1933, 1953, 1969, 1981, 1999, 2015, 2033, 2043, 2051, 2061, 2077, 2089, 2107, 2113, 2125, 2137, 2145, 2153, 2161, 2173, 2183, 2193, 2203, 2215, 2225, 2231, 2237, 2243, 2253, 2263, 2271, 2281, 2289, 2297, 2305, 2320, 2338, 2354, 2365, 2383, 2395, 2405, 2419, 2427, 2435, 2453, 2469, 2488, 2510, 2518, 2524, 2536, 2546, 2556, 2570, 2588, 2608, 2618, 2628, 2638, 2648, 2660, 2674, 2686, 2706, 2712, 2718, 2728, 2740, 2754, 2764, 2784, 2792, 2800, 2808, 2816, 2822, 2828, 2840, 2850, 2863, 2882, 2892, 2906, 2922, 2930, 2942, 2950, 2960, 2966, 2980, 2986, 2998, 3010, 3016, 3028, 3038, 3043, 3049, 3059, 3075, 3085, 3097, 3111, 3121, 3131, 3149, 3155, 3165, 3171, 3185, 3195, 3211, 3225, 3233, 3247, 3255, 3263, 3279, 3285, 3295, 3303, 3313, 3319, 3333, 3339, 3350, 3364, 3372, 3380, 3394, 3404, 3414, 3428, 3436, 3444, 3460, 3468, 3480, 3486, and 3500, and sequences of SEQ ID NOS: 13, 21, 23, 25, 31, 33, 35, 37, 39, 41, 43, 49, 51, 53, 59, 61, 63, 77, 79, 81, 87, 89, 95, 97, 99, 113, 115, 117, 127, 129, 131, 133, 135, 137, 139, 141, 147, 149, 155, 161, 163, 165, 167, 169, 171, 173, 175, 181, 183, 185, 187, 189, 191, 193, 195, 197, 199, 201, 207, 209, 211, 217, 219, 225, 227, 229, 231, 237, 239, 245, 253, 255, 261, 263, 265, 267, 273, 275, 277, 279, 285, 287, 289, 301, 307, 309, 311, 317, 319, 321, 327, 333, 335, 344, 346, 348, 350, 352, 354, 364, 366, 376, 378, 380, 382, 384, 386, 388, 390, 396, 408, 410, 416, 418, 426, 432, 434, 436, 438, 440, 442, 448, 459, 461, 463, 469, 471, 477, 483, 485, 491, 493, 495, 497, 503, 505, 507, 509, 511, 517, 519, 521, 523, 525, 531, 533, 535, 541, 543, 549, 555, 557, 559, 561, 563, 565, 573, 575, 577, 579, 581, 589, 591, 597, 599, 605, 607, 613, 615, 621, 627, 629, 631, 637, 643, 645, 647, 649, 651, 653, 655, 657, 668, 674, 680, 682, 688, 697, 703, 709, 711, 717, 719, 721, 727, 729, 731, 733, 739, 741, 743, 749, 751, 757, 759, 765, 767, 773, 775, 783, 785, 787, 793, 795, 797, 803, 805, 807, 809, 811, 821, 823, 825, 831, 833, 835, 837, 839, 841, 843, 849, 851, 853, 867, 869, 875, 877, 879, 881, 883, 895, 901, 903, 909, 911, 913, 919, 921, 927, 929, 931, 937, 943, 945, 951, 953, 955, 961, 963, 969, 971, 973, 975, 981, 983, 985, 987, 999, 1001, 1003, 1005, 1007, 1013, 1015, 1017, 1019, 1021, 1027, 1029, 1035, 1037, 1039, 1041, 1043, 1049, 1058, 1060, 1062, 1064, 1066, 1068, 1070, 1072, 1078, 1080, 1082, 1088, 1090, 1096, 1102, 1108, 1110, 1112, 1114, 1116, 1122, 1128, 1134, 1136, 1142, 1144, 1150, 1156, 1158, 1160, 1166, 1168, 1174, 1176, 1178, 1184, 1186, 1192, 1194, 1196, 1208, 1210, 1212, 1218, 1220, 1226, 1228, 1230, 1232, 1238, 1244, 1246, 1248, 1254, 1256, 1258, 1260, 1262, 1264, 1266, 1272, 1274, 1276, 1278, 1280, 1282, 1288, 1290, 1292, 1294, 1296, 1302, 1304, 1310, 1312, 1314, 1316, 1328, 1334, 1336, 1338, 1340, 1348, 1350, 1356, 1362, 1368, 1370, 1372, 1374, 1380, 1382, 1384, 1390, 1392, 1398, 1401, 1403, 1405, 1407, 1409, 1417, 1419, 1421, 1423, 1425, 1427, 1437, 1439, 1441, 1443, 1445, 1447, 1449, 1451, 1457, 1463, 1465, 1467, 1469, 1475, 1483, 1485, 1491, 1500, 1502, 1508, 1510, 1516, 1518, 1520, 1522, 1524, 1534, 1540, 1542, 1550, 1552, 1554, 1560, 1562, 1564, 1566, 1572, 1574, 1580, 1582, 1584, 1590, 1592, 1604, 1606, 1608, 1610, 1612, 1614, 1620, 1626, 1628, 1634, 1636, 1644, 1650, 1658, 1660, 1662, 1664, 1670, 1676, 1678, 1680, 1686, 1692, 1694, 1700, 1702, 1704, 1706, 1712, 1714, 1720, 1722, 1732, 1734, 1736, 1738, 1744, 1746, 1752, 1754, 1765, 1767, 1773, 1775, 1777, 1779, 1781, 1794, 1800, 1802, 1804, 1806, 1812, 1818, 1820, 1822, 1830, 1832, 1834, 1840, 1842, 1844, 1850, 1856, 1858, 1864, 1870, 1872, 1878, 1884, 1886, 1894, 1896, 1898, 1900, 1902, 1904, 1910, 1912, 1914, 1916, 1918, 1924, 1926, 1928, 1934, 1936, 1938, 1954, 1956, 1958, 1960, 1962, 1964, 1970, 1972, 1982, 1984, 1986, 2000, 2002, 2004, 2006, 2016, 2018, 2020, 2022, 2024, 2034, 2036, 2038, 2044, 2046, 2052, 2054, 2056, 2062, 2064, 2066, 2068, 2070, 2072, 2078, 2080, 2082, 2090, 2092, 2094, 2096, 2098, 2108, 2114, 2116, 2118, 2120, 2126, 2128, 2130, 2138, 2140, 2146, 2148, 2154, 2156, 2162, 2164, 2166, 2168, 2174, 2176, 2178, 2184, 2186, 2188, 2194, 2196, 2198, 2204, 2206, 2208, 2216, 2218, 2220, 2226, 2232, 2238, 2244, 2246, 2248, 2254, 2256, 2258, 2264, 2266, 2272, 2274, 2276, 2282, 2284, 2290, 2292, 2298, 2300, 2306, 2308, 2310, 2312, 2314, 2316, 2318, 2321, 2323, 2325, 2327, 2329, 2331, 2333, 2339, 2341, 2343, 2345, 2355, 2366, 2368, 2370, 2372, 2384, 2386, 2388, 2390, 2396, 2398, 2406, 2408, 2410, 2412, 2420, 2422, 2428, 2430, 2436, 2438, 2454, 2456, 2458, 2460, 2470, 2472, 2474, 2476, 2478, 2489, 2491, 2493, 2495, 2497, 2499, 2501, 2503, 2505, 2511, 2513, 2519, 2525, 2527, 2529, 2531, 2537, 2539, 2541, 2547, 2549, 2551, 2557, 2559, 2561, 2563, 2571, 2573, 2575, 2577, 2589, 2591, 2593, 2595, 2597, 2599, 2601, 2603, 2609, 2611, 2613, 2619, 2621, 2623, 2629, 2631, 2639, 2641, 2649, 2651, 2653, 2655, 2661, 2663, 2665, 2667, 2669, 2675, 2677, 2679, 2681, 2687, 2689, 2691, 2693, 2695, 2697, 2699, 2701, 2707, 2713, 2719, 2721, 2729, 2731, 2733, 2741, 2743, 2745, 2747, 2755, 2757, 2759, 2765, 2767, 2769, 2771, 2785, 2793, 2795, 2801, 2809, 2811, 2817, 2823, 2829, 2831, 2833, 2835, 2841, 2843, 2845, 2851, 2853, 2855, 2857, 2859, 2861, 2864, 2866, 2868, 2870, 2872, 2874, 2883, 2885, 2887, 2893, 2895, 2897, 2899, 2907, 2909, 2911, 2913, 2915, 2917, 2923, 2925, 2931, 2933, 2935, 2937, 2943, 2951, 2953, 2955, 2961, 2967, 2969, 2971, 2973, 2975, 2981, 2987, 2989, 2991, 2993, 2999, 3001, 3003, 3011, 3017, 3019, 3021, 3029, 3039, 3041, 3044, 3050, 3052, 3054, 3060, 3062, 3064, 3066, 3068, 3076, 3086, 3088, 3090, 3092, 3098, 3100, 3102, 3104, 3106, 3112, 3114, 3116, 3122, 3124, 3126, 3132, 3134, 3136, 3138, 3140, 3142, 3144, 3150, 3156, 3158, 3160, 3166, 3172, 3174, 3186, 3188, 3190, 3196, 3198, 3200, 3202, 3204, 3212, 3214, 3216, 3218, 3220, 3226, 3228, 3234, 3236, 3238, 3248, 3250, 3256, 3258, 3264, 3266, 3268, 3270, 3272, 3280, 3286, 3288, 3296, 3298, 3304, 3306, 3308, 3314, 3320, 3322, 3324, 3326, 3328, 3334, 3340, 3342, 3351, 3353, 3365, 3367, 3373, 3375, 3381, 3383, 3385, 3387, 3389, 3395, 3397, 3405, 3407, 3415, 3417, 3419, 3421, 3423, 3429, 3431, 3437, 3445, 3447, 3449, 3451, 3453, 3455, 3461, 3463, 3469, 3471, 3473, 3481, 3487, 3489, 3491, 3493, 3501, and 3503 corresponding to the human mRNAs generated therefrom). In a preferred embodiment, the CAP is selected from the human protein sequences shown in Tables 1-336 (of SEQ ID NOS: 14, 22, 24, 26, 32, 34, 36, 38, 40, 42, 44, 50, 52, 54, 60, 62, 64, 78, 80, 82, 88, 90, 96, 98, 100, 114, 116, 118, 128, 130, 132, 134, 136, 138, 140, 142, 148, 150, 156, 162, 164, 166, 168, 170, 172, 174, 176, 182, 184, 186, 188, 190, 192, 194, 196, 198, 200, 202, 208, 210, 212, 218, 220, 226, 228, 230, 232, 238, 240, 246, 254, 256, 262, 264, 266, 268, 274, 276, 278, 280, 286, 288, 290, 302, 308, 310, 312, 318, 320, 322, 328, 334, 336, 345, 347, 349, 351, 353, 355, 365, 367, 377, 379, 381, 383, 385, 387, 389, 391, 397, 409, 411, 417, 419, 427, 433, 435, 437, 439, 441, 443, 449, 460, 462, 464, 470, 472, 478, 484, 486, 492, 494, 496, 498, 504, 506, 508, 510, 512, 518, 520, 522, 524, 526, 532, 534, 536, 542, 544, 550, 556, 558, 560, 562, 564, 566, 574, 576, 578, 580, 582, 590, 592, 598, 600, 606, 608, 614, 616, 622, 628, 630, 632, 638, 644, 646, 648, 650, 652, 654, 656, 658, 669, 675, 681, 683, 689, 698, 704, 710, 712, 718, 720, 722, 728, 730, 732, 734, 740, 742, 744, 750, 752, 758, 760, 766, 768, 774, 776, 784, 786, 788, 794, 796, 798, 804, 806, 808, 810, 812, 822, 824, 826, 832, 834, 836, 838, 840, 842, 844, 850, 852, 854, 868, 870, 876, 878, 880, 882, 884, 896, 902, 904, 910, 912, 914, 920, 922, 928, 930, 932, 938, 944, 946, 952, 954, 956, 962, 964, 970, 972, 974, 976, 982, 984, 986, 988, 1000, 1002, 1004, 1006, 1008, 1014, 1016, 1018, 1020, 1022, 1028, 1030, 1036, 1038, 1040, 1042, 1044, 1050, 1059, 1061, 1063, 1065, 1067, 1069, 1071, 1073, 1079, 1081, 1083, 1089, 1091, 1097, 1103, 1109, 1111, 1113, 1115, 1117, 1123, 1129, 1135, 1137, 1143, 1145, 1151, 1157, 1159, 1161, 1167, 1169, 1175, 1177, 1179, 1185, 1187, 1193, 1195, 1197, 1209, 1211, 1213, 1219, 1221, 1227, 1229, 1231, 1233, 1239, 1245, 1247, 1249, 1255, 1257, 1259, 1261, 1263, 1265, 1267, 1273, 1275, 1277, 1279, 1281, 1283, 1289, 1291, 1293, 1295, 1297, 1303, 1305, 1311, 1313, 1315, 1317, 1329, 1335, 1337, 1339, 1341, 1349, 1351, 1357, 1363, 1369, 1371, 1373, 1375, 1381, 1383, 1385, 1391, 1393, 1399, 1402, 1404, 1406, 1408, 1410, 1418, 1420, 1422, 1424, 1426, 1428, 1438, 1440, 1442, 1444, 1446, 1448, 1450, 1452, 1458, 1464, 1466, 1468, 1470, 1476, 1484, 1486, 1492, 1501, 1503, 1509, 1511, 1517, 1519, 1521, 1523, 1525, 1535, 1541, 1543, 1551, 1553, 1555, 1561, 1563, 1565, 1567, 1573, 1575, 1581, 1583, 1585, 1591, 1593, 1605, 1607, 1609, 1611, 1613, 1615, 1621, 1627, 1629, 1635, 1637, 1645, 1651, 1659, 1661, 1663, 1665, 1671, 1677, 1679, 1681, 1687, 1693, 1695, 1701, 1703, 1705, 1707, 1713, 1715, 1721, 1723, 1733, 1735, 1737, 1739, 1745, 1747, 1753, 1755, 1766, 1768, 1774, 1776, 1778, 1780, 1782, 1795, 1801, 1803, 1805, 1807, 1813, 1819, 1821, 1823, 1831, 1833, 1835, 1841, 1843, 1845, 1851, 1857, 1859, 1865, 1871, 1873, 1879, 1885, 1887, 1895, 1897, 1899, 1901, 1903, 1905, 1911, 1913, 1915, 1917, 1919, 1925, 1927, 1929, 1935, 1937, 1939, 1955, 1957, 1959, 1961, 1963, 1965, 1971, 1973, 1983, 1985, 1987, 2001, 2003, 2005, 2007, 2017, 2019, 2021, 2023, 2025, 2035, 2037, 2039, 2045, 2047, 2053, 2055, 2057, 2063, 2065, 2067, 2069, 2071, 2073, 2079, 2081, 2083, 2091, 2093, 2095, 2097, 2099, 2109, 2115, 2117, 2119, 2121, 2127, 2129, 2131, 2139, 2141, 2147, 2149, 2155, 2157, 2163, 2165, 2167, 2169, 2175, 2177, 2179, 2185, 2187, 2189, 2195, 2197, 2199, 2205, 2207, 2209, 2217, 2219, 2221, 2227, 2233, 2239, 2245, 2247, 2249, 2255, 2257, 2259, 2265, 2267, 2273, 2275, 2277, 2283, 2285, 2291, 2293, 2299, 2301, 2307, 2309, 2311, 2313, 2315, 2317, 2319, 2322, 2324, 2326, 2328, 2330, 2332, 2334, 2340, 2342, 2344, 2346, 2356, 2367, 2369, 2371, 2373, 2385, 2387, 2389, 2391, 2397, 2399, 2407, 2409, 2411, 2413, 2421, 2423, 2429, 2431, 2437, 2439, 2455, 2457, 2459, 2461, 2471, 2473, 2475, 2477, 2479, 2490, 2492, 2494, 2496, 2498, 2500, 2502, 2504, 2506, 2512, 2514, 2520, 2526, 2528, 2530, 2532, 2538, 2540, 2542, 2548, 2550, 2552, 2558, 2560, 2562, 2564, 2572, 2574, 2576, 2578, 2590, 2592, 2594, 2596, 2598, 2600, 2602, 2604, 2610, 2612, 2614, 2620, 2622, 2624, 2630, 2632, 2640, 2642, 2650, 2652, 2654, 2656, 2662, 2664, 2666, 2668, 2670, 2676, 2678, 2680, 2682, 2688, 2690, 2692, 2694, 2696, 2698, 2700, 2702, 2708, 2714, 2720, 2722, 2730, 2732, 2734, 2742, 2744, 2746, 2748, 2756, 2758, 2760, 2766, 2768, 2770, 2772, 2786, 2794, 2796, 2802, 2810, 2812, 2818, 2824, 2830, 2832, 2834, 2836, 2842, 2844, 2846, 2852, 2854, 2856, 2858, 2860, 2862, 2865, 2867, 2869, 2871, 2873, 2875, 2884, 2886, 2888, 2894, 2896, 2898, 2900, 2908, 2910, 2912, 2914, 2916, 2918, 2924, 2926, 2932, 2934, 2936, 2938, 2944, 2952, 2954, 2956, 2962, 2968, 2970, 2972, 2974, 2976, 2982, 2988, 2990, 2992, 2994, 3000, 3002, 3004, 3012, 3018, 3020, 3022, 3030, 3040, 3042, 3045, 3051, 3053, 3055, 3061, 3063, 3065, 3067, 3069, 3077, 3087, 3089, 3091, 3093, 3099, 3101, 3103, 3105, 3107, 3113, 3115, 3117, 3123, 3125, 3127, 3133, 3135, 3137, 3139, 3141, 3143, 3145, 3151, 3157, 3159, 3161, 3167, 3173, 3175, 3187, 3189, 3191, 3197, 3199, 3201, 3203, 3205, 3213, 3215, 3217, 3219, 3221, 3227, 3229, 3235, 3237, 3239, 3249, 3251, 3257, 3259, 3265, 3267, 3269, 3271, 3273, 3281, 3287, 3289, 3297, 3299, 3305, 3307, 3309, 3315, 3321, 3323, 3325, 3327, 3329, 3335, 3341, 3343, 3352, 3354, 3366, 3368, 3374, 3376, 3382, 3384, 3386, 3388, 3390, 3396, 3398, 3406, 3408, 3416, 3418, 3420, 3422, 3424, 3430, 3432, 3438, 3446, 3448, 3450, 3452, 3454, 3456, 3462, 3464, 3470, 3472, 3474, 3482, 3488, 3490, 3492, 3494, 3502, and 3504). In another embodiment, the sequences are sequence variants as further described herein.

[0216] Preferably, the CAP is a fragment approximately 14 to 24 amino acids in length. More preferably the fragment is a soluble fragment. Preferably, the fragment includes a non-transmembrane region. In a preferred embodiment, the fragment has an N-terminal Cys to aid in solubility. In one embodiment, the C-terminus of the fragment is kept as a free acid and the N-terminus is a free amine to aid in coupling, e.g., to a cysteine.

[0217] In one embodiment the CA proteins are conjugated to an immunogenic agent as discussed herein. In one embodiment the CA protein is conjugated to BSA.

[0218] In a preferred embodiment, screening is done to alter the biological function of the expression product of the CA gene. Again, having identified the importance of a gene in a particular state, screening for agents that bind and/or modulate the biological activity of the gene product can be run as is more fully outlined below.

[0219] In a preferred embodiment, screens are designed to first find candidate agents that can bind to CA proteins, and then these agents may be used in assays that evaluate the ability of the candidate agent to modulate the CAP activity and the cancer phenotype. Thus, as will be appreciated by those in the art, there are a number of different assays that may be run; binding assays and activity assays.

[0220] In a preferred embodiment, binding assays are done. In general, purified or isolated gene product is used; that is, the gene products of one or more CA nucleic acids are made. In general, this is done as is known in the art. For example, antibodies are generated to the protein gene products, and standard immunoassays are run to determine the amount of protein present. Alternatively, cells comprising the CA proteins can be used in the assays.

[0221] Thus, in a preferred embodiment, the methods comprise combining a CA protein and a candidate bioactive agent, and determining the binding of the candidate agent to the CA protein. Preferred embodiments utilize the human or mouse CA protein, although other mammalian proteins may also be used, for example for the development of animal models of human disease. In some embodiments, as outlined herein, variant or derivative CA proteins may be used.

[0222] Generally, in a preferred embodiment of the methods herein, the CA protein or the candidate agent is non-diffusably bound to an insoluble support having isolated sample receiving areas (e.g. a microtiter plate, an array, etc.). The insoluble support may be made of any composition to which the compositions can be bound, is readily separated from soluble material, and is otherwise compatible with the overall method of screening. The surface of such supports may be solid or porous and of any convenient shape. Examples of suitable insoluble supports include microtiter plates, arrays, membranes and beads. These are typically made of glass, plastic (e.g., polystyrene), polysaccharides, nylon or nitrocellulose, Teflon®, etc. Microtiter plates and arrays are especially convenient because a large number of assays can be carried out simultaneously, using small amounts of reagents and samples.

[0223] The particular manner of binding of the composition is not crucial so long as it is compatible with the reagents and overall methods of the invention, maintains the activity of the composition and is nondiffusable. Preferred methods of binding include the use of antibodies (which do not sterically block either the ligand binding site or activation sequence when the protein is bound to the support), direct binding to “sticky” or ionic supports, chemical crosslinking, the synthesis of the protein or agent on the surface, etc. Following binding of the protein or agent, excess unbound material is removed by washing. The sample receiving areas may then be blocked through incubation with bovine serum albumin (BSA), casein or other innocuous protein or other moiety.

[0224] In a preferred embodiment, the CA protein is bound to the support, and a candidate bioactive agent is added to the assay. Alternatively, the candidate agent is bound to the support and the CA protein is added. Novel binding agents include specific antibodies, non-natural binding agents identified in screens of chemical libraries, peptide analogs, etc. Of particular interest are screening assays for agents that have a low toxicity for human cells. A wide variety of assays may be used for this purpose, including labeled in vitro protein-protein binding assays, electrophoretic mobility shift assays, immunoassays for protein binding, functional assays (phosphorylation assays, etc.) and the like.

[0225] The determination of the binding of the candidate bioactive agent to the CA protein may be done in a number of ways. In a preferred embodiment, the candidate bioactive agent is labeled, and binding determined directly. For example, this may be done by attaching all or a portion of the CA protein to a solid support, adding a labeled candidate agent (for example a fluorescent label), washing off excess reagent, and determining whether the label is present on the solid support. Various blocking and washing steps may be utilized as is known in the art.

[0226] By “labeled” herein is meant that the compound is either directly or indirectly labeled with a label which provides a detectable signal, e.g. radioisotope, fluorescers, enzyme, antibodies, particles such as magnetic particles, chemiluminescers, or specific binding molecules, etc. Specific binding molecules include pairs, such as biotin and streptavidin, digoxin and antidigoxin etc. For the specific binding members, the complementary member would normally be labeled with a molecule which provides for detection, in accordance with known procedures, as outlined above. The label can directly or indirectly provide a detectable signal.

[0227] In some embodiments, only one of the components is labeled. For example, the proteins (or proteinaceous candidate agents) may be labeled at tyrosine positions using ¹²⁵I, or with fluorophores. Alternatively, more than one component may be labeled with different labels; using ¹²⁵I, for the proteins, for example, and a fluorophore for the candidate agents.

[0228] In a preferred embodiment, the binding of the candidate bioactive agent is determined through the use of competitive binding assays. In this embodiment, the competitor is a binding moiety known to bind to the target molecule (i.e. CA protein), such as an antibody, peptide, binding partner, ligand, etc. Under certain circumstances, there may be competitive binding as between the bioactive agent and the binding moiety, with the binding moiety displacing the bioactive agent.

[0229] In one embodiment, the candidate bioactive agent is labeled. Either the candidate bioactive agent, or the competitor, or both, is added first to the protein for a time sufficient to allow binding, if present. Incubations may be performed at any temperature which facilitates optimal activity, typically between 4 and 40° C. Incubation periods are selected for optimum activity, but may also be optimized to facilitate rapid high throughput screening. Typically between 0.1 and 1 hour will be sufficient. Excess reagent is generally removed or washed away. The second component is then added, and the presence or absence of the labeled component is followed, to indicate binding.

[0230] In a preferred embodiment, the competitor is added first, followed by the candidate bioactive agent. Displacement of the competitor is an indication that the candidate bioactive agent is binding to the CA protein and thus is capable of binding to, and potentially modulating, the activity of the CA protein. In this embodiment, either component can be labeled. Thus, for example, if the competitor is labeled, the presence of label in the wash solution indicates displacement by the agent. Alternatively, if the candidate bioactive agent is labeled, the presence of the label on the support indicates displacement.

[0231] In an alternative embodiment, the candidate bioactive agent is added first, with incubation and washing, followed by the competitor. The absence of binding by the competitor may indicate that the bioactive agent is bound to the CA protein with a higher affinity. Thus, if the candidate bioactive agent is labeled, the presence of the label on the support, coupled with a lack of competitor binding, may indicate that the candidate agent is capable of binding to the CA protein.

[0232] In a preferred embodiment, the methods comprise differential screening to identity bioactive agents that are capable of modulating the activity of the CA proteins. In this embodiment, the methods comprise combining a CA protein and a competitor in a first sample. A second sample comprises a candidate bioactive agent, a CA protein and a competitor. The binding of the competitor is determined for both samples, and a change, or difference in binding between the two samples indicates the presence of an agent capable of binding to the CA protein and potentially modulating its activity. That is, if the binding of the competitor is different in the second sample relative to the first sample, the agent is capable of binding to the CA protein.

[0233] Alternatively, a preferred embodiment utilizes differential screening to identify drug candidates that bind to the native CA protein, but cannot bind to modified CA proteins. The structure of the CA protein may be modeled, and used in rational drug design to synthesize agents that interact with that site. Drug candidates that affect CA bioactivity are also identified by screening drugs for the ability to either enhance or reduce the activity of the protein.

[0234] Positive controls and negative controls may be used in the assays. Preferably all control and test samples are performed in at least triplicate to obtain statistically significant results. Incubation of all samples is for a time sufficient for the binding of the agent to the protein. Following incubation, all samples are washed free of non-specifically bound material and the amount of bound, generally labeled agent determined. For example, where a radiolabel is employed, the samples may be counted in a scintillation counter to determine the amount of bound compound.

[0235] A variety of other reagents may be included in the screening assays. These include reagents like salts, neutral proteins, e.g. albumin, detergents, etc which may be used to facilitate optimal protein-protein binding and/or reduce non-specific or background interactions. Also reagents that otherwise improve the efficiency of the assay, such as protease inhibitors, nuclease inhibitors, anti-microbial agents, etc., may be used. The mixture of components may be added in any order that provides for the requisite binding.

[0236] Screening for agents that modulate the activity of CA proteins may also be done. In a preferred embodiment, methods for screening for a bioactive agent capable of modulating the activity of CA proteins comprise the steps of adding a candidate bioactive agent to a sample of CA proteins, as above, and determining an alteration in the biological activity of CA proteins. “Modulating the activity of a CA protein” includes an increase in activity, a decrease in activity, or a change in the type or kind of activity present. Thus, in this embodiment, the candidate agent should both bind to CA proteins (although this may not be necessary), and alter its biological or biochemical activity as defined herein. The methods include both in vitro screening methods, as are generally outlined above, and in vivo screening of cells for alterations in the presence, distribution, activity or amount of CA proteins.

[0237] Thus, in this embodiment, the methods comprise combining a CA sample and a candidate bioactive agent, and evaluating the effect on CA activity. By “CA activity” or grammatical equivalents herein is meant one of the CA protein's biological activities, including, but not limited to, its role in tumorigenesis, including cell division, preferably in lymphatic tissue, cell proliferation, tumor growth and transformation of cells. In one embodiment, CA activity includes activation of or by a protein encoded by a nucleic acid of Tables 1-336. An inhibitor of CA activity is the inhibition of any one or more CA activities.

[0238] In a preferred embodiment, the activity of the CA protein is increased; in another preferred embodiment, the activity of the CA protein is decreased. Thus, bioactive agents that are antagonists are preferred in some embodiments, and bioactive agents that are agonists may be preferred in other embodiments.

[0239] In a preferred embodiment, the invention provides methods for screening for bioactive agents capable of modulating the activity of a CA protein. The methods comprise adding a candidate bioactive agent, as defined above, to a cell comprising CA proteins. Preferred cell types include almost any cell. The cells contain a recombinant nucleic acid that encodes a CA protein. In a preferred embodiment, a library of candidate agents is tested on a plurality of cells.

[0240] In one aspect, the assays are evaluated in the presence or absence or previous or subsequent exposure of physiological signals, for example hormones, antibodies, peptides, antigens, cytokines, growth factors, action potentials, pharmacological agents including chemotherapeutics, radiation, carcinogenics, or other cells (i.e. cell-cell contacts). In another example, the determinations are determined at different stages of the cell cycle process.

[0241] In this way, bioactive agents are identified. Compounds with pharmacological activity are able to enhance or interfere with the activity of the CA protein.

Applications of the Invention

[0242] In one embodiment, a method of inhibiting cancer cell division is provided. In another embodiment, a method of inhibiting tumor growth is provided. In a further embodiment, methods of treating cells or individuals with cancer are provided.

[0243] The method comprises administration of a cancer inhibitor. In particular embodiments, the cancer inhibitor is an antisense molecule, a pharmaceutical composition, a therapeutic agent or small molecule, or a monoclonal, polyclonal, chimeric or humanized antibody. In particular embodiments, a therapeutic agent is coupled with a an antibody, preferable a monoclonal antibody.

[0244] In other embodiments, methods for detection or diagnosis of cancer cells in an individual are provided. In particular embodiments, the diagnostic/detection agent is a small molecule that preferentially binds to a CAP according to the invention. In one embodiment, the diagnostic/detection agent is an antibody, preferably a monoclonal antobody, preferably linked to a detectable agent.

[0245] In other embodiments of the invention, animal models and transgenic animals are provided, which find use in generating animal models of cancers, particularly lymphomas and carcinomas.

(a) Antisense Molecules

[0246] In one embodiment, the cancer inhibitor is an antisense molecule. Antisense molecules as used herein include antisense or sense oligonucleotides comprising a single-stranded nucleic acid sequence (either RNA or DNA) capable of binding to target mRNA (sense) or DNA (antisense) sequences for cancer molecules. Antisense or sense oligonucleotides, according to the present invention, comprise a fragment generally at least about 14 nucleotides, preferably from about 14 to 30 nucleotides. The ability to derive an antisense or a sense oligonucleotide, based upon a cDNA sequence encoding a given protein is described in, for example, Stein and Cohen, Cancer Res. 48:2659, (1988) and van der Krol et al., BioTechniques 6:958, (1988).

[0247] Antisense molecules can be modified or unmodified RNA, DNA, or mixed polymer oligonucleotides. These molecules function by specifically binding to matching sequences resulting in inhibition of peptide synthesis (Wu-Pong, November 1994, BioPharm, 20-33) either by steric blocking or by activating an RNase H enzyme. Antisense molecules can also alter protein synthesis by interfering with RNA processing or transport from the nucleus into the cytoplasm (Mukhopadhyay & Roth, 1996, Crit. Rev. in Oncogenesis 7, 151-190). In addition, binding of single stranded DNA to RNA can result in nuclease-mediated degradation of the heteroduplex (Wu-Pong, supra). Backbone modified DNA chemistry which have thus far been shown to act as substrates for RNase H are phosphorothioates, phosphorodithioates, borontrifluoridates, and 2′-arabino and 2′-fluoro arabino-containing oligonucleotides.

[0248] Antisense molecules may be introduced into a cell containing the target nucleotide sequence by formation of a conjugate with a ligand binding molecule, as described in WO 91/04753. Suitable ligand binding molecules include, but are not limited to, cell surface receptors, growth factors, other cytokines, or other ligands that bind to cell surface receptors. Preferably, conjugation of the ligand binding molecule does not substantially interfere with the ability of the ligand binding molecule to bind to its corresponding molecule or receptor, or block entry of the sense or antisense oligonucleotide or its conjugated version into the cell. Alternatively, a sense or an antisense oligonucleotide may be introduced into a cell containing the target nucleic acid sequence by formation of an oligonucleotide-lipid complex, as described in WO 90/10448. It is understood that the use of antisense molecules or knock out and knock in models may also be used in screening assays as discussed above, in addition to methods of treatment.

(b) RNA Interference

[0249] RNA interference refers to the process of sequence-specific post transcriptional gene silencing in animals mediated by short interfering RNAs (siRNA) (Fire et al., Nature, 391, 806 (1998)). The corresponding process in plants is referred to as post transcriptional gene silencing or RNA silencing and is also referred to as quelling in fungi. The presence of dsRNA in cells triggers the RNAi response though a mechanism that has yet to be fully characterized. This mechanism appears to be different from the interferon response that results from dsRNA mediated activation of protein kinase PKR and 2′,5′-oligoadenylate synthetase resulting in non-specific cleavage of mRNA by ribonuclease L. (reviewed in Sharp, P. A., RNA interference—2001, Genes & Development 15:485-490 (2001)).

[0250] Small interfering RNAs (siRNAs) are powerful sequence-specific reagents designed to suppress the expression of genes in cultured mammalian cells through a process known as RNA interference (RNAi). Elbashir, S. M. et al. Nature 411:494-498 (2001); Caplen, N. J. et al. Proc. Natl. Acad. Sci. USA 98:9742-9747 (2001); Harborth, J. et al. J Cell Sci. 114:4557-4565 (2001). The term “short interfering RNA” or “siRNA” refers to a double stranded nucleic acid molecule capable of RNA interference “RNAi”, (see Kreutzer et al., WO 00/44895; Zernicka-Goetz et al. WO 01/36646; Fire, WO 99/32619; Mello and Fire, WO 01/29058). As used herein, siRNA molecules are limited to RNA molecules but further encompasses chemically modified nucleotides and non-nucleotides. siRNA gene-targeting experiments have been carried out by transient siRNA transfer into cells (achieved by such classic methods as liposome-mediated transfection, electroporation, or microinjection).

[0251] Molecules of siRNA are 21- to 23-nucleotide RNAs, with characteristic 2- to 3-nucleotide 3′-overhanging ends resembling the RNase III processing products of long double-stranded RNAs (dsRNAs) that normally initiate RNAi. When introduced into a cell, they assemble with yet-to-be-identified proteins of an endonuclease complex (RNA-induced silencing complex), which then guides target mRNA cleavage. As a consequence of degradation of the targeted mRNA, cells with a specific phenotype characteristic of suppression of the corresponding protein product are obtained. The small size of siRNAs, compared with traditional antisense molecules, prevents activation of the dsRNA-inducible interferon system present in mammalian cells. This avoids the nonspecific phenotypes normally produced by dsRNA larger than 30 base pairs in somatic cells.

[0252] Intracellular transcription of small RNA molecules is achieved by cloning the siRNA templates into RNA polymerase III (Pol III) transcription units, which normally encode the small nuclear RNA (snRNA) U6 or the human RNase P RNA H1. Two approaches have been developed for expressing siRNAs: in the first, sense and antisense strands constituting the siRNA duplex are transcribed by individual promoters (Lee, N. S. et al. Nat. Biotechnol. 20, 500-505 (2002). Miyagishi, M. & Taira, K. Nat. Biotechnol. 20, 497-500 (2002).); in the second, siRNAs are expressed as fold-back stem-loop structures that give rise to siRNAs after intracellular processing (Paul, C. P. et al. Nat. Biotechnol. 20:505-508 (2002)). The endogenous expression of siRNAs from introduced DNA templates is thought to overcome some limitations of exogenous siRNA delivery, in particular the transient loss of phenotype. U6 and H1 RNA promoters are members of the type III class of Pol III promoters. (Paule, M. R. & White, R. J. Nucleic Acids Res. 28, 1283-1298 (2000)).

[0253] Co-expression of sense and antisense siRNAs mediate silencing of target genes, whereas expression of sense or antisense siRNA alone do not greatly affect target gene expression. Transfection of plasmid DNA, rather than synthetic siRNAs, may appear advantageous, considering the danger of RNase contamination and the costs of chemically synthesized siRNAs or siRNA transcription kits. Stable expression of siRNAs allows new gene therapy applications, such as treatment of persistent viral infections. Considering the high specificity of siRNAs, the approach also allows the targeting of disease-derived transcripts with point mutations, such as RAS or TP53 oncogene transcripts, without alteration of the remaining wild-type allele. Finally, by high-throughput sequence analysis of the various genomes, the DNA-based methodology may also be a cost-effective alternative for automated genome-wide loss-of-function phenotypic analysis, especially when combined with miniaturized array-based phenotypic screens. (Ziauddin, J. & Sabatini, D. M. Nature 411:107-110 (2001)).

[0254] The presence of long dsRNAs in cells stimulates the activity of a ribonuclease III enzyme referred to as dicer. Dicer is involved in the processing of the dsRNA into short pieces of dsRNA known as short interfering RNAs (siRNA) (Berstein et al., 2001, Nature, 409:363 (2001)). Short interfering RNAs derived from dicer activity are typically about 21-23 nucleotides in length and comprise about 19 base pair duplexes. Dicer has also been implicated in the excision of 21 and 22 nucleotide small temporal RNAs (stRNA) from precursor RNA of conserved structure that are implicated in translational control (Hutvagner et al., Science, 293, 834 (2001)). The RNAi response also features an endonuclease complex containing a siRNA, commonly referred to as an RNA-induced silencing complex (RISC), which mediates cleavage of single stranded RNA having sequence homologous to the siRNA. Cleavage of the target RNA takes place in the middle of the region complementary to the guide sequence of the siRNA duplex (Elbashir et al., Genes Dev., 15, 188 (2001)).

[0255] This invention provides an expression system comprising an isolated nucleic acid molecule comprising a sequence capable of specifically hybridizing to the CA sequences. In an embodiment, the nucleic acid molecule is capable of inhibiting the expression of the CA protein. A method of inhibiting expression of CA inside a cell by a vector-directed expression of a short RNA which short RNA can fold in itself and create a double strand RNA having CA mRNA sequence identity and able to trigger posttranscriptional gene silencing, or RNA interference (RNAi), of the CA gene inside the cell. In another method a short double strand RNA having CA mRNA sequence identity is delivered inside the cell to trigger posttranscriptional gene silencing, or RNAi, of the CA gene. In various embodiments, the nucleic acid molecule is at least a 7 mer, at least a 10 mer, or at least a 20 mer. In a further embodiment, the sequence is unique.

(c) Pharmaceutical Compositions

[0256] Pharmaceutical compositions encompassed by the present invention include as active agent, the polypeptides, polynucleotides, antisense oligonucleotides, or antibodies of the invention disclosed herein in a therapeutically effective amount. An “effective amount” is an amount sufficient to effect beneficial or desired results, including clinical results. An effective amount can be administered in one or more administrations. For purposes of this invention, an effective amount of an adenoviral vector is an amount that is sufficient to palliate, ameliorate, stabilize, reverse, slow or delay the progression of the disease state.

[0257] The compositions can be used to treat cancer as well as metastases of primary cancer. In addition, the pharmaceutical compositions can be used in conjunction with conventional methods of cancer treatment, e.g., to sensitize tumors to radiation or conventional chemotherapy. The terms “treatment”, “treating”, “treat” and the like are used herein to generally refer to obtaining a desired pharmacologic and/or physiologic effect. The effect may be prophylactic in terms of completely or partially preventing a disease or symptom thereof and/or may be therapeutic in terms of a partial or complete stabilization or cure for a disease and/or adverse effect attributable to the disease. “Treatment” as used herein covers any treatment of a disease in a mammal, particularly a human, and includes: (a) preventing the disease or symptom from occurring in a subject which may be predisposed to the disease or symptom but has not yet been diagnosed as having it; (b) inhibiting the disease symptom, i.e., arresting its development; or (c) relieving the disease symptom, i.e., causing regression of the disease or symptom.

[0258] Where the pharmaceutical composition comprises an antibody that specifically binds to a gene product encoded by a differentially expressed polynucleotide, the antibody can be coupled to a drug for delivery to a treatment site or coupled to a detectable label to facilitate imaging of a site comprising cancer cells, such as prostate cancer cells. Methods for coupling antibodies to drugs and detectable labels are well known in the art, as are methods for imaging using detectable labels.

[0259] A “patient” for the purposes of the present invention includes both humans and other animals, particularly mammals, and organisms. Thus the methods are applicable to both human therapy and veterinary applications. In the preferred embodiment the patient is a mammal, and in the most preferred embodiment the patient is human.

[0260] The term “therapeutically effective amount” as used herein refers to an amount of a therapeutic agent to treat, ameliorate, or prevent a desired disease or condition, or to exhibit a detectable therapeutic or preventative effect. The effect can be detected by, for example, chemical markers or antigen levels. Therapeutic effects also include reduction in physical symptoms, such as decreased body temperature. The precise effective amount for a subject will depend upon the subject's size and health, the nature and extent of the condition, and the therapeutics or combination of therapeutics selected for administration. The effective amount for a given situation is determined by routine experimentation and is within the judgment of the clinician. For purposes of the present invention, an effective dose will generally be from about 0.01 mg/kg to about 5 mg/kg, or about 0.01 mg/kg to about 50 mg/kg or about 0.05 mg/kg to about 10 mg/kg of the compositions of the present invention in the individual to which it is administered.

[0261] A pharmaceutical composition can also contain a pharmaceutically acceptable carrier. The term “pharmaceutically acceptable carrier” refers to a carrier for administration of a therapeutic agent, such as antibodies or a polypeptide, genes, and other therapeutic agents. The term refers to any pharmaceutical carrier that does not itself induce the production of antibodies harmful to the individual receiving the composition, and which can be administered without undue toxicity. Suitable carriers can be large, slowly metabolized macromolecules such as proteins, polysaccharides, polylactic acids, polyglycolic acids, polymeric amino acids, amino acid copolymers, and inactive virus particles. Such carriers are well known to those of ordinary skill in the art. Pharmaceutically acceptable carriers in therapeutic compositions can include liquids such as water, saline, glycerol and ethanol. Auxiliary substances, such as wetting or emulsifying agents, pH buffering substances, and the like, can also be present in such vehicles. Typically, the therapeutic compositions are prepared as injectables, either as liquid solutions or suspensions; solid forms suitable for solution in, or suspension in, liquid vehicles prior to injection can also be prepared. Liposomes are included within the definition of a pharmaceutically acceptable carrier. Pharmaceutically acceptable salts can also be present in the pharmaceutical composition, e.g., mineral acid salts such as hydrochlorides, hydrobromides, phosphates, sulfates, and the like; and the salts of organic acids such as acetates, propionates, malonates, benzoates, and the like. A thorough discussion of pharmaceutically acceptable excipients is available in Remington: The Science and Practice of Pharmacy (1995) Alfonso Gennaro, Lippincott, Williams, & Wilkins.

[0262] The pharmaceutical compositions can be prepared in various forms, such as granules, tablets, pills, suppositories, capsules, suspensions, salves, lotions and the like. Pharmaceutical grade organic or inorganic carriers and/or diluents suitable for oral and topical use can be used to make up compositions containing the therapeutically-active compounds. Diluents known to the art include aqueous media, vegetable and animal oils and fats. Stabilizing agents, wetting and emulsifying agents, salts for varying the osmotic pressure or buffers for securing an adequate pH value, and skin penetration enhancers can be used as auxiliary agents.

[0263] The pharmaceutical compositions of the present invention comprise a CA protein in a form suitable for administration to a patient. In the preferred embodiment, the pharmaceutical compositions are in a water soluble form, such as being present as pharmaceutically acceptable salts, which is meant to include both acid and base addition salts. “Pharmaceutically acceptable acid addition salt” refers to those salts that retain the biological effectiveness of the free bases and that are not biologically or otherwise undesirable, formed with inorganic acids such as hydrochloric acid, hydrobromic acid, sulfuric acid, nitric acid, phosphoric acid and the like, and organic acids such as acetic acid, propionic acid, glycolic acid, pyruvic acid, oxalic acid, maleic acid, malonic acid, succinic acid, fumaric acid, tartaric acid, citric acid, benzoic acid, cinnamic acid, mandelic acid, methanesulfonic acid, ethanesulfonic acid, p-toluenesulfonic acid, salicylic acid and the like. “Pharmaceutically acceptable base addition salts” include those derived from inorganic bases such as sodium, potassium, lithium, ammonium, calcium, magnesium, iron, zinc, copper, manganese, aluminum salts and the like. Particularly preferred are the ammonium, potassium, sodium, calcium, and magnesium salts. Salts derived from pharmaceutically acceptable organic non-toxic bases include salts of primary, secondary, and tertiary amines, substituted amines including naturally occurring substituted amines, cyclic amines and basic ion exchange resins, such as isopropylamine, trimethylamine, diethylamine, triethylamine, tripropylamine, and ethanolamine.

[0264] The pharmaceutical compositions may also include one or more of the following: carrier proteins such as serum albumin; buffers; fillers such as microcrystalline cellulose, lactose, corn and other starches; binding agents; sweeteners and other flavoring agents; coloring agents; and polyethylene glycol. Additives are well known in the art, and are used in a variety of formulations.

[0265] The compounds having the desired pharmacological activity may be administered in a physiologically acceptable carrier to a host, as previously described. The agents may be administered in a variety of ways, orally, parenterally e.g., subcutaneously, intraperitoneally, intravascularly, etc. Depending upon the manner of introduction, the compounds may be formulated in a variety of ways. The concentration of therapeutically active compound in the formulation may vary from about 0.1-100% wgt/vol. Once formulated, the compositions contemplated by the invention can be (1) administered directly to the subject (e.g., as polynucleotide, polypeptides, small molecule agonists or antagonists, and the like); or (2) delivered ex vivo, to cells derived from the subject (e.g., as in ex vivo gene therapy). Direct delivery of the compositions will generally be accomplished by parenteral injection, e.g., subcutaneously, intraperitoneally, intravenously or intramuscularly, intratumoral or to the interstitial space of a tissue. Other modes of administration include oral and pulmonary administration, suppositories, and transdermal applications, needles, and gene guns or hyposprays. Dosage treatment can be a single dose schedule or a multiple dose schedule.

[0266] Methods for the ex vivo delivery and reimplantation of transformed cells into a subject are known in the art and described in e.g., International Publication No. WO 93/14778. Examples of cells useful in ex vivo applications include, for example, stem cells, particularly hematopoetic, lymph cells, macrophages, dendritic cells, or tumor cells. Generally, delivery of nucleic acids for both ex vivo and in vitro applications can be accomplished by, for example, dextran-mediated transfection, calcium phosphate precipitation, polybrene mediated transfection, protoplast fusion, electroporation, encapsulation of the polynucleotide(s) in liposomes, and direct microinjection of the DNA into nuclei, all well known in the art.

[0267] Once differential expression of a gene corresponding to a CA polynucleotide described herein has been found to correlate with a proliferative disorder, such as neoplasia, dysplasia, and hyperplasia, the disorder can be amenable to treatment by administration of a therapeutic agent based on the provided polynucleotide, corresponding polypeptide or other corresponding molecule (e.g., antisense, ribozyme, etc.). In other embodiments, the disorder can be amenable to treatment by administration of a small molecule drug that, for example, serves as an inhibitor (antagonist) of the function of the encoded gene product of a gene having increased expression in cancerous cells relative to normal cells or as an agonist for gene products that are decreased in expression in cancerous cells (e.g., to promote the activity of gene products that act as tumor suppressors).

[0268] The dose and the means of administration of the inventive pharmaceutical compositions are determined based on the specific qualities of the therapeutic composition, the condition, age, and weight of the patient, the progression of the disease, and other relevant factors. For example, administration of polynucleotide therapeutic compositions agents includes local or systemic administration, including injection, oral administration, particle gun or catheterized administration, and topical administration. Preferably, the therapeutic polynucleotide composition contains an expression construct comprising a promoter operably linked to a polynucleotide of at least 12, 22, 25, 30, or 35 contiguous nt of the polynucleotide disclosed herein. Various methods can be used to administer the therapeutic composition directly to a specific site in the body. For example, a small metastatic lesion is located and the therapeutic composition injected several times in several different locations within the body of tumor. Alternatively, arteries that serve a tumor are identified, and the therapeutic composition injected into such an artery, in order to deliver the composition directly into the tumor. A tumor that has a necrotic center is aspirated and the composition injected directly into the now empty center of the tumor. An antisense composition is directly administered to the surface of the tumor, for example, by topical application of the composition. X-ray imaging is used to assist in certain of the above delivery methods.

[0269] Targeted delivery of therapeutic compositions containing an antisense polynucleotide, subgenomic polynucleotides, or antibodies to specific tissues can also be used. Receptor-mediated DNA delivery techniques are described in, for example, Findeis et al., Trends Biotechnol. (1993) 11:202; Chiou et al., Gene Therapeutics: Methods And Applications Of Direct Gene Transfer (J. A. Wolff, ed.) (1994); Wu et al., J. Biol. Chem. (1988) 263:621; Wu et al., J. Biol. Chem. (1994) 269:542; Zenke et al., Proc. Natl. Acad. Sci. (USA) (1990) 87:3655; Wu et al., J. Biol. Chem. (1991) 266:338. Therapeutic compositions containing a polynucleotide are administered in a range of about 100 ng to about 200 mg of DNA for local administration in a gene therapy protocol. Concentration ranges of about 500 ng to about 50 mg, about 1 μg to about 2 mg, about 5 μg to about 500 μg, and about 20 μg to about 100 μg of DNA can also be used during a gene therapy protocol. Factors such as method of action (e.g., for enhancing or inhibiting levels of the encoded gene product) and efficacy of transformation and expression are considerations that will affect the dosage required for ultimate efficacy of the antisense subgenomic polynucleotides. Where greater expression is desired over a larger area of tissue, larger amounts of antisense subgenomic polynucleotides or the same amounts re-administered in a successive protocol of administrations, or several administrations to different adjacent or close tissue portions of, for example, a tumor site, may be required to effect a positive therapeutic outcome. In all cases, routine experimentation in clinical trials will determine specific ranges for optimal therapeutic effect.

[0270] The therapeutic polynucleotides and polypeptides of the present invention can be delivered using gene delivery vehicles. The gene delivery vehicle can be of viral or non-viral origin (see generally, Jolly, Cancer Gene Therapy (1994) 1:51; Kimura, Human Gene Therapy (1994) 5:845; Connelly, Human Gene Therapy (1995) 1:185; and Kaplitt, Nature Genetics (1994) 6:148). Expression of such coding sequences can be induced using endogenous mammalian or heterologous promoters. Expression of the coding sequence can be either constitutive or regulated.

[0271] Viral-based vectors for delivery of a desired polynucleotide and expression in a desired cell are well known in the art. Exemplary viral-based vehicles include, but are not limited to, recombinant retroviruses (see, e.g., WO 90/07936; WO 94/03622; WO 93/25698; WO 93/25234; U.S. Pat. No. 5,219,740; WO 93/11230; WO 93/10218; U.S. Pat. No. 4,777,127; GB Patent No. 2,200,651; EP 0 345 242; and WO 91/02805), alphavirus-based vectors (e.g., Sindbis virus vectors, Semliki forest virus (ATCC VR-67; ATCC VR-1247), Ross River virus (ATCC VR-373; ATCC VR-1246) and Venezuelan equine encephalitis virus (ATCC VR-923; ATCC VR-1250; ATCC VR 1249; ATCC VR-532)), and adeno-associated virus (AAV) vectors (see, e.g., WO 94/12649, WO 93/03769; WO 93/19191; WO 94/28938; WO 95/11984 and WO 95/00655). Administration of DNA linked to killed adenovirus as described in Curiel, Hum. Gene Ther. (1992) 3:147 can also be employed.

[0272] Non-viral delivery vehicles and methods can also be employed, including, but not limited to, polycationic condensed DNA linked or unlinked to killed adenovirus alone (see, e.g., Curiel, Hum. Gene Ther. (1992) 3:147); ligand-linked DNA (see, e.g., Wu, J. Biol. Chem. (1989) 264:16985); eukaryotic cell delivery vehicles cells (see, e.g., U.S. Pat. No. 5,814,482; WO 95/07994; WO 96/17072; WO 95/30763; and WO 97/42338) and nucleic charge neutralization or fusion with cell membranes. Naked DNA can also be employed. Exemplary naked DNA introduction methods are described in WO 90/11092 and U.S. Pat. No. 5,580,859. Liposomes that can act as gene delivery vehicles are described in U.S. Pat. No. 5,422,120; WO 95/13796; WO 94/23697; WO 91/14445; and EP 0524968. Additional approaches are described in Philip, Mol. Cell. Biol. (1994) 14:2411, and in Woffendin, Proc. Natl. Acad. Sci. (1994) 91:1581.

[0273] Further non-viral delivery suitable for use includes mechanical delivery systems such as the approach described in Woffendin et al., Proc. Natl. Acad. Sci. USA (1994) 91(24): 11581. Moreover, the coding sequence and the product of expression of such can be delivered through deposition of photopolymerized hydrogel materials or use of ionizing radiation (see, e.g., U.S. Pat. No. 5,206,152 and WO 92/11033). Other conventional methods for gene delivery that can be used for delivery of the coding sequence include, for example, use of hand-held gene transfer particle gun (see, e.g., U.S. Pat. No. 5,149,655); use of ionizing radiation for activating transferred gene (see, e.g., U.S. Pat. No. 5,206,152 and WO 92/11033).

[0274] The administration of the CA proteins and modulators of the present invention can be done in a variety of ways as discussed above, including, but not limited to, orally, subcutaneously, intravenously, intranasally, transdermally, intraperitoneally, intramuscularly, intrapulmonary, vaginally, rectally, or intraocularly. In some instances, for example, in the treatment of wounds and inflammation, the CA proteins and modulators may be directly applied as a solution or spray.

[0275] In a preferred embodiment, CA proteins and modulators are administered as therapeutic agents, and can be formulated as outlined above. Similarly, CA genes (including both the full-length sequence, partial sequences, or regulatory sequences of the CA coding regions) can be administered in gene therapy applications, as is known in the art. These CA genes can include antisense applications, either as gene therapy (i.e. for incorporation into the genome) or as antisense compositions, as will be appreciated by those in the art.

[0276] Thus, in one embodiment, methods of modulating CA gene activity in cells or organisms are provided. In one embodiment, the methods comprise administering to a cell an anti-CA antibody that reduces or eliminates the biological activity of an endogenous CA protein. Alternatively, the methods comprise administering to a cell or organism a recombinant nucleic acid encoding a CA protein. As will be appreciated by those in the art, this may be accomplished in any number of ways. In a preferred embodiment, for example when the CA sequence is down-regulated in cancer, the activity of the CA gene product is increased by increasing the amount of CA expression in the cell, for example by overexpressing the endogenous CA gene or by administering a gene encoding the CA sequence, using known gene-therapy techniques. In a preferred embodiment, the gene therapy techniques include the incorporation of the exogenous gene using enhanced homologous recombination (EHR), for example as described in PCT/US93/03868, hereby incorporated by reference in its entirety. Alternatively, for example when the CA sequence is up-regulated in cancer, the activity of the endogenous CA gene is decreased, for example by the administration of a CA antisense nucleic acid.

(d) Vaccines

[0277] In a preferred embodiment, CA genes are administered as DNA vaccines, either single genes or combinations of CA genes. Naked DNA vaccines are generally known in the art. Brower, Nature Biotechnology, 16:1304-1305 (1998).

[0278] In one embodiment, CA genes of the present invention are used as DNA vaccines. Methods for the use of genes as DNA vaccines are well known to one of ordinary skill in the art, and include placing a CA gene or portion of a CA gene under the control of a promoter for expression in a patient with cancer. The CA gene used for DNA vaccines can encode full-length CA proteins, but more preferably encodes portions of the CA proteins including peptides derived from the CA protein. In a preferred embodiment a patient is immunized with a DNA vaccine comprising a plurality of nucleotide sequences derived from a CA gene. Similarly, it is possible to immunize a patient with a plurality of CA genes or portions thereof. Without being bound by theory, expression of the polypeptide encoded by the DNA vaccine, cytotoxic T-cells, helper T-cells and antibodies are induced that recognize and destroy or eliminate cells expressing CA proteins.

[0279] In a preferred embodiment, the DNA vaccines include a gene encoding an adjuvant molecule with the DNA vaccine. Such adjuvant molecules include cytokines that increase the immunogenic response to the CA polypeptide encoded by the DNA vaccine. Additional or alternative adjuvants are known to those of ordinary skill in the art and find use in the invention.

(e) Antibodies

[0280] In one embodiment, a cancer inhibitor is an antibody as discussed above. In one embodiment, the CA proteins of the present invention may be used to generate polyclonal and monoclonal antibodies to CA proteins, which are useful as described herein. Similarly, the CA proteins can be coupled, using standard technology, to affinity chromatography columns. These columns may then be used to purify CA antibodies. In a preferred embodiment, the antibodies are generated to epitopes unique to a CA protein; that is, the antibodies show little or no cross-reactivity to other proteins. These antibodies find use in a number of applications. For example, the CA antibodies may be coupled to standard affinity chromatography columns and used to purify CA proteins. The antibodies may also be used therapeutically as blocking polypeptides, as outlined above, since they will specifically bind to the CA protein.

[0281] The present invention further provides methods for detecting the presence of and/or measuring a level of a polypeptide in a biological sample, which CA polypeptide is encoded by a CA polynucleotide that is differentially expressed in a cancer cell, using an antibody specific for the encoded polypeptide. The methods generally comprise: a) contacting the sample with an antibody specific for a polypeptide encoded by a CA polynucleotide that is differentially expressed in a prostate cancer cell; and b) detecting binding between the antibody and molecules of the sample.

[0282] Detection of specific binding of the antibody specific for the encoded cancer-associated polypeptide, when compared to a suitable control is an indication that encoded polypeptide is present in the sample. Suitable controls include a sample known not to contain the encoded CA polypeptide or known not to contain elevated levels of the polypeptide; such as normal tissue, and a sample contacted with an antibody not specific for the encoded polypeptide, e.g., an anti-idiotype antibody. A variety of methods to detect specific antibody-antigen interactions are known in the art and can be used in the method, including, but not limited to, standard immunohistological methods, immunoprecipitation, an enzyme immunoassay, and a radioimmunoassay. In general, the specific antibody will be detectably labeled, either directly or indirectly. Direct labels include radioisotopes; enzymes whose products are detectable (e.g., luciferase, β-galactosidase, and the like); fluorescent labels (e.g., fluorescein isothiocyanate, rhodamine, phycoerythrin, and the like); fluorescence emitting metals, e.g., ¹⁵²Eu, or others of the lanthanide series, attached to the antibody through metal chelating groups such as EDTA; chemiluminescent compounds, e.g., luminol, isoluminol, acridinium salts, and the like; bioluminescent compounds, e.g., luciferin, aequorin (green fluorescent protein), and the like. The antibody may be attached (coupled) to an insoluble support, such as a polystyrene plate or a bead. Indirect labels include second antibodies specific for antibodies specific for the encoded polypeptide (“first specific antibody”), wherein the second antibody is labeled as described above; and members of specific binding pairs, e.g., biotin-avidin, and the like. The biological sample may be brought into contact with and immobilized on a solid support or carrier, such as nitrocellulose, that is capable of immobilizing cells, cell particles, or soluble proteins. The support may then be washed with suitable buffers, followed by contacting with a detectably-labeled first specific antibody. Detection methods are known in the art and will be chosen as appropriate to the signal emitted by the detectable label. Detection is generally accomplished in comparison to suitable controls, and to appropriate standards.

[0283] In some embodiments, the methods are adapted for use in vivo, e.g., to locate or identify sites where cancer cells are present. In these embodiments, a detectably-labeled moiety, e.g., an antibody, which is specific for a cancer-associated polypeptide is administered to an individual (e.g., by injection), and labeled cells are located using standard imaging techniques, including, but not limited to, magnetic resonance imaging, computed tomography scanning, and the like. In this manner, cancer cells are differentially labeled.

(f) Detection and Diagnosis of Cancers

[0284] Without being bound by theory, it appears that the various CA sequences are important in cancers. Accordingly, disorders based on mutant or variant CA genes may be determined. In one embodiment, the invention provides methods for identifying cells containing variant CA genes comprising determining all or part of the sequence of at least one endogenous CA genes in a cell. As will be appreciated by those in the art, this may be done using any number of sequencing techniques. In a preferred embodiment, the invention provides methods of identifying the CA genotype of an individual comprising determining all or part of the sequence of at least one CA gene of the individual. This is generally done in at least one tissue of the individual, and may include the evaluation of a number of tissues or different samples of the same tissue. The method may include comparing the sequence of the sequenced CA gene to a known CA gene, i.e., a wild-type gene. As will be appreciated by those in the art, alterations in the sequence of some CA genes can be an indication of either the presence of the disease, or propensity to develop the disease, or prognosis evaluations.

[0285] The sequence of all or part of the CA gene can then be compared to the sequence of a known CA gene to determine if any differences exist. This can be done using any number of known homology programs, such as Bestfit, etc. In a preferred embodiment, the presence of a difference in the sequence between the CA gene of the patient and the known CA gene is indicative of a disease state or a propensity for a disease state, as outlined herein.

[0286] In a preferred embodiment, the CA genes are used as probes to determine the number of copies of the CA gene in the genome. For example, some cancers exhibit chromosomal deletions or insertions, resulting in an alteration in the copy number of a gene.

[0287] In another preferred embodiment CA genes are used as probes to determine the chromosomal location of the CA genes. Information such as chromosomal location finds use in providing a diagnosis or prognosis in particular when chromosomal abnormalities such as translocations, and the like are identified in CA gene loci.

[0288] The present invention provides methods of using the polynucleotides described herein for detecting cancer cells, facilitating diagnosis of cancer and the severity of a cancer (e.g., tumor grade, tumor burden, and the like) in a subject, facilitating a determination of the prognosis of a subject, and assessing the responsiveness of the subject to therapy (e.g., by providing a measure of therapeutic effect through, for example, assessing tumor burden during or following a chemotherapeutic regimen). Detection can be based on detection of a polynucleotide that is differentially expressed in a cancer cell, and/or detection of a polypeptide encoded by a polynucleotide that is differentially expressed in a cancer cell. The detection methods of the invention can be conducted in vitro or in vivo, on isolated cells, or in whole tissues or a bodily fluid e.g., blood, plasma, serum, urine, and the like).

[0289] In some embodiments, methods are provided for detecting a cancer cell by detecting expression in the cell of a transcript that is differentially expressed in a cancer cell. Any of a variety of known methods can be used for detection, including, but not limited to, detection of a transcript by hybridization with a polynucleotide that hybridizes to a polynucleotide that is differentially expressed in a prostate cancer cell; detection of a transcript by a polymerase chain reaction using specific oligonucleotide primers; in situ hybridization of a cell using as a probe a polynucleotide that hybridizes to a gene that is differentially expressed in a prostate cancer cell. The methods can be used to detect and/or measure mRNA levels of a gene that is differentially expressed in a cancer cell. In some embodiments, the methods comprise: a) contacting a sample with a polynucleotide that corresponds to a differentially expressed gene described herein under conditions that allow hybridization; and b) detecting hybridization, if any.

[0290] Detection of differential hybridization, when compared to a suitable control, is an indication of the presence in the sample of a polynucleotide that is differentially expressed in a cancer cell. Appropriate controls include, for example, a sample that is known not to contain a polynucleotide that is differentially expressed in a cancer cell, and use of a labeled polynucleotide of the same “sense” as the polynucleotide that is differentially expressed in the cancer cell. Conditions that allow hybridization are known in the art, and have been described in more detail above. Detection can also be accomplished by any known method, including, but not limited to, in situ hybridization, PCR (polymerase chain reaction), RT-PCR (reverse transcription-PCR), TMA, bDNA, and Nasbau and “Northern” or RNA blotting, or combinations of such techniques, using a suitably labeled polynucleotide. A variety of labels and labeling methods for polynucleotides are known in the art and can be used in the assay methods of the invention. Specificity of hybridization can be determined by comparison to appropriate controls.

[0291] Polynucleotides generally comprising at least 10 nt, at least 12 nt or at least 15 contiguous nucleotides of a polynucleotide provided herein, such as, for example, those having the sequence as depicted in Tables 1-336, are used for a variety of purposes, such as probes for detection of and/or measurement of, transcription levels of a polynucleotide that is differentially expressed in a prostate cancer cell. As will be readily appreciated by the ordinarily skilled artisan, the probe can be detectably labeled and contacted with, for example, an array comprising immobilized polynucleotides obtained from a test sample (e.g., mRNA). Alternatively, the probe can be immobilized on an array and the test sample detectably labeled. These and other variations of the methods of the invention are well within the skill in the art and are within the scope of the invention.

[0292] Nucleotide probes are used to detect expression of a gene corresponding to the provided polynucleotide. In Northern blots, mRNA is separated electrophoretically and contacted with a probe. A probe is detected as hybridizing to an mRNA species of a particular size. The amount of hybridization can be quantitated to determine relative amounts of expression, for example under a particular condition. Probes are used for in situ hybridization to cells to detect expression. Probes can also be used in vivo for diagnostic detection of hybridizing sequences. Probes are typically labeled with a radioactive isotope. Other types of detectable labels can be used such as chromophores, fluorophores, and enzymes. Other examples of nucleotide hybridization assays are described in WO92/02526 and U.S. Pat. No. 5,124,246.

[0293] PCR is another means for detecting small amounts of target nucleic acids (see, e.g., Mullis et al., Meth. Enzymol. (1987) 155:335; U.S. Pat. No. 4,683,195; and U.S. Pat. No. 4,683,202). Two primer oligonucleotides that hybridize with the target nucleic acids are used to prime the reaction. The primers can be composed of sequence within or 3′ and 5′ to the CA polynucleotides disclosed herein. Alternatively, if the primers are 3′ and 5′ to these polynucleotides, they need not hybridize to them or the complements. After amplification of the target with a thermostable polymerase, the amplified target nucleic acids can be detected by methods known in the art, e.g., Southern blot. mRNA or cDNA can also be detected by traditional blotting techniques (e.g., Southern blot, Northern blot, etc.) described in Sambrook et al., “Molecular Cloning: A Laboratory Manual” (New York, Cold Spring Harbor Laboratory, 1989) (e.g., without PCR amplification). In general, mRNA or cDNA generated from mRNA using a polymerase enzyme can be purified and separated using gel electrophoresis, and transferred to a solid support, such as nitrocellulose. The solid support is exposed to a labeled probe, washed to remove any unhybridized probe, and duplexes containing the labeled probe are detected.

[0294] Methods using PCR amplification can be performed on the DNA from a single cell, although it is convenient to use at least about 10⁵ cells. The use of the polymerase chain reaction is described in Saiki et al. (1985) Science 239:487, and a review of current techniques may be found in Sambrook, et al. Molecular Cloning: A Laboratory Manual, CSH Press 1989, pp. 14.2-14.33. A detectable label may be included in the amplification reaction. Suitable detectable labels include fluorochromes, (e.g. fluorescein isothiocyanate (FITC), rhodamine, Texas Red, phycoerythrin, allophycocyanin, 6-carboxyfluorescein (6-FAM), 2′,7′-dimethoxy-4′,5′-dichloro-6-carboxyfluorescein, 6-carboxy-X-rhodamine (ROX), 6-carboxy-2′,4′,7′,4,7-hexachlorofluorescein (HEX), 5-carboxyfluorescein (5-FAM) or N,N,N′,N′-tetramethyl-6-carboxyrhodamine (TAMRA)), radioactive labels, (e.g. ³²P, ³⁵S, ³H, etc.), and the like. The label may be a two stage system, where the polynucleotides is conjugated to biotin, haptens, etc. having a high affinity binding partner, e.g. avidin, specific antibodies, etc., where the binding partner is conjugated to a detectable label. The label may be conjugated to one or both of the primers. Alternatively, the pool of nucleotides used in the amplification is labeled, so as to incorporate the label into the amplification product.

[0295] The detection methods can be provided as part of a kit. Thus, the invention further provides kits for detecting the presence and/or a level of a polynucleotide that is differentially expressed in a cancer cell (e.g., by detection of an mRNA encoded by the differentially expressed gene of interest), and/or a polypeptide encoded thereby, in a biological sample. Procedures using these kits can be performed by clinical laboratories, experimental laboratories, medical practitioners, or private individuals. The kits of the invention for detecting a polypeptide encoded by a polynucleotide that is differentially expressed in a cancer cell may comprise a moiety that specifically binds the polypeptide, which may be an antibody that binds the polypeptide or fragment thereof. The kits of the invention used for detecting a polynucleotide that is differentially expressed in a prostate cancer cell may comprise a moiety that specifically hybridizes to such a polynucleotide. The kit may optionally provide additional components that are useful in the procedure, including, but not limited to, buffers, developing reagents, labels, reacting surfaces, means for detection, control samples, standards, instructions, and interpretive information. Accordingly, the present invention provides kits for detecting prostate cancer comprising at least one of polynucleotides having the sequence as shown in Tables 1-336 or fragments thereof.

[0296] The present invention further relates to methods of detecting/diagnosing a neoplastic or preneoplastic condition in a mammal (for example, a human). “Diagnosis” as used herein generally includes determination of a subject's susceptibility to a disease or disorder, determination as to whether a subject is presently affected by a disease or disorder, prognosis of a subject affected by a disease or disorder (e.g., identification of pre-metastatic or metastatic cancerous states, stages of cancer, or responsiveness of cancer to therapy), and therametrics (e.g., monitoring a subject's condition to provide information as to the effect or efficacy of therapy).

[0297] The terms “treatment”, “treating”, “treat” and the like are used herein to generally refer to obtaining a desired pharmacologic and/or physiologic effect. The effect may be prophylactic in terms of completely or partially preventing a disease or symptom thereof and/or may be therapeutic in terms of a partial or complete stabilization or cure for a disease and/or adverse effect attributable to the disease. “Treatment” as used herein covers any treatment of a disease in a mammal, particularly a human, and includes: (a) preventing the disease or symptom from occurring in a subject which may be predisposed to the disease or symptom but has not yet been diagnosed as having it; (b) inhibiting the disease symptom, i.e., arresting its development; or (c) relieving the disease symptom, i.e., causing regression of the disease or symptom.

[0298] An “effective amount” is an amount sufficient to effect beneficial or desired results, including clinical results. An effective amount can be administered in one or more administrations.

[0299] A “cell sample” encompasses a variety of sample types obtained from an individual and can be used in a diagnostic or monitoring assay. The definition encompasses blood and other liquid samples of biological origin, solid tissue samples such as a biopsy specimen or tissue cultures or cells derived therefrom, and the progeny thereof. The definition also includes samples that have been manipulated in any way after their procurement, such as by treatment with reagents, solubilization, or enrichment for certain components, such as proteins or polynucleotides. The term “cell sample” encompasses a clinical sample, and also includes cells in culture, cell supernatants, cell lysates, serum, plasma, biological fluid, and tissue samples.

[0300] As used herein, the terms “neoplastic cells”, “neoplasia”, “tumor”, “tumor cells”, “cancer” and “cancer cells”, (used interchangeably) refer to cells which exhibit relatively autonomous growth, so that they exhibit an aberrant growth phenotype characterized by a significant loss of control of cell proliferation (i.e., de-regulated cell division). Neoplastic cells can be malignant or benign.

[0301] The terms “individual,” “subject,” “host,” and “patient,” are used interchangeably herein and refer to any mammalian subject for whom diagnosis, treatment, or therapy is desired, particularly humans. Other subjects may include cattle, dogs, cats, guinea pigs, rabbits, rats, mice, horses, and so on. Examples of conditions that can be detected/diagnosed in accordance with these methods include cancers. Polynucleotides corresponding to genes that exhibit the appropriate expression pattern can be used to detect cancer in a subject. For a review of markers of cancer, see, e.g., Hanahan et al. Cell 100:57-70 (2000).

[0302] One detection/diagnostic method comprises: (a) obtaining from a mammal (e.g., a human) a biological sample, (b) detecting the presence in the sample of a CA protein and (c) comparing the amount of product present with that in a control sample. In accordance with this method, the presence in the sample of elevated levels of a CA gene product indicates that the subject has a neoplastic or preneoplastic condition.

[0303] Biological samples suitable for use in this method include biological fluids such as serum, plasma, pleural effusions, urine and cerebro-spinal fluid, CSF, tissue samples (e.g., mammary tumor or prostate tissue slices) can also be used in the method of the invention, including samples derived from biopsies. Cell cultures or cell extracts derived, for example, from tissue biopsies can also be used.

[0304] The compound is preferably a binding protein, e.g., an antibody, polyclonal or monoclonal, or antigen binding fragment thereof, which can be labeled with a detectable marker (e.g., fluorophore, chromophore or isotope, etc). Where appropriate, the compound can be attached to a solid support such as a bead, plate, filter, resin, etc. Determination of formation of the complex can be effected by contacting the complex with a further compound (e.g., an antibody) that specifically binds to the first compound (or complex). Like the first compound, the further compound can be attached to a solid support and/or can be labeled with a detectable marker.

[0305] The identification of elevated levels of CA protein in accordance with the present invention makes possible the identification of subjects (patients) that are likely to benefit from adjuvant therapy. For example, a biological sample from a post primary therapy subject (e.g., subject having undergone surgery) can be screened for the presence of circulating CA protein, the presence of elevated levels of the protein, determined by studies of normal populations, being indicative of residual tumor tissue. Similarly, tissue from the cut site of a surgically removed tumor can be examined (e.g., by immunofluorescence), the presence of elevated levels of product (relative to the surrounding tissue) being indicative of incomplete removal of the tumor. The ability to identify such subjects makes it possible to tailor therapy to the needs of the particular subject. Subjects undergoing non-surgical therapy, e.g., chemotherapy or radiation therapy, can also be monitored, the presence in samples from such subjects of elevated levels of CA protein being indicative of the need for continued treatment. Staging of the disease (for example, for purposes of optimizing treatment regimens) can also be effected, for example, by biopsy e.g., with antibody specific for a CA protein.

(g) Animal Models and Transgenics

[0306] In another preferred embodiment CA genes find use in generating animal models of cancers, particularly lymphomas and carcinomas. As is appreciated by one of ordinary skill in the art, when the CA gene identified is repressed or diminished in CA tissue, gene therapy technology wherein antisense RNA directed to the CA gene will also diminish or repress expression of the gene. An animal generated as such serves as an animal model of CA that finds use in screening bioactive drug candidates. Similarly, gene knockout technology, for example as a result of homologous recombination with an appropriate gene targeting vector, will result in the absence of the CA protein. When desired, tissue-specific expression or knockout of the CA protein may be necessary.

[0307] It is also possible that the CA protein is overexpressed in cancer. As such, transgenic animals can be generated that overexpress the CA protein. Depending on the desired expression level, promoters of various strengths can be employed to express the transgene. Also, the number of copies of the integrated transgene can be determined and compared for a determination of the expression level of the transgene. Animals generated by such methods find use as animal models of CA and are additionally useful in screening for bioactive molecules to treat cancer.

Characterization of CA Sequences

[0308] The CA nucleic acid sequences of the invention are depicted in Tables 1-336. The sequences in each Table include genomic DNA sequence (mouse genomic sequences mDxx-yyy; human genomic sequences hDxx-yyy), sequence corresponding to the mRNA(s) generated therefrom (mRxx-yyy; hRxx-yyy) and amino acid sequences of the proteins (mPxx-yyy; hpxx-yyy) encoded by the mRNA for both mouse and human genes. N/A indicates a gene that has been identified, but for which there has not been a name ascribed.

[0309] The mouse and human genomic DNA sequence, sequence corresponding to the mRNA(s) generated therefrom and amino acid sequences of the proteins as shown in Tables 1-336 are described according to SEQ ID NOS as follows in Table 50.

TABLE 50

| DESIGNATION | SEQ ID NO | TYPE OF SEQUENCE |
|---|---|---|
| mD18-040 | SEQ ID NO: 1 | MOUSE GENOMIC SEQUENCE |
| mR18-040.1 | SEQ ID NO: 2 | MOUSE mRNA SEQUENCE |
| mP18-040.1 | SEQ ID NO: 3 | MOUSE PROTEIN SEQUENCE |
| hD18-040 | SEQ ID NO: 4 | HUMAN GENOMIC SEQUENCE |
| hR18-040.1 | SEQ ID NO: 5 | HUMAN mRNA SEQUENCE |
| hP18-040.1 | SEQ ID NO: 6 | HUMAN PROTEIN SEQUENCE |
| hR18-040.2 | SEQ ID NO: 7 | HUMAN mRNA SEQUENCE |
| hP18-040.2 | SEQ ID NO: 8 | HUMAN PROTEIN SEQUENCE |
| hR18-040.3 | SEQ ID NO: 9 | HUMAN mRNA SEQUENCE |
| hP18-040.3 | SEQ ID NO: 10 | HUMAN PROTEIN SEQUENCE |
| hR18-040.4 | SEQ ID NO: 11 | HUMAN mRNA SEQUENCE |
| hP18-040.4 | SEQ ID NO: 12 | HUMAN PROTEIN SEQUENCE |
| hR18-040.5 | SEQ ID NO: 13 | HUMAN mRNA SEQUENCE |
| hP18-040.5 | SEQ ID NO: 14 | HUMAN PROTEIN SEQUENCE |
| mD18-044 | SEQ ID NO: 15 | MOUSE GENOMIC SEQUENCE |
| mR18-044.1 | SEQ ID NO: 16 | MOUSE mRNA SEQUENCE |
| mP18-044.1 | SEQ ID NO: 17 | MOUSE PROTEIN SEQUENCE |
| mR18-044.2 | SEQ ID NO: 18 | MOUSE mRNA SEQUENCE |
| mP18-044.2 | SEQ ID NO: 19 | MOUSE PROTEIN SEQUENCE |
| hD18-044 | SEQ ID NO: 20 | HUMAN GENOMIC SEQUENCE |
| hR18-044.1 | SEQ ID NO: 21 | HUMAN mRNA SEQUENCE |
| hP18-044.1 | SEQ ID NO: 22 | HUMAN PROTEIN SEQUENCE |
| mD19-001 | SEQ ID NO: 23 | MOUSE GENOMIC SEQUENCE |
| mR19-001.1 | SEQ ID NO: 24 | MOUSE mRNA SEQUENCE |
| mP19-001.1 | SEQ ID NO: 25 | MOUSE PROTEIN SEQUENCE |
| hD19-001 | SEQ ID NO: 26 | HUMAN GENOMIC SEQUENCE |
| hR19-001.1 | SEQ ID NO: 27 | HUMAN mRNA SEQUENCE |
| hP19-001.1 | SEQ ID NO: 28 | HUMAN PROTEIN SEQUENCE |
| hR19-001.2 | SEQ ID NO: 29 | HUMAN mRNA SEQUENCE |
| hP19-001.2 | SEQ ID NO: 30 | HUMAN PROTEIN SEQUENCE |
| mD19-004 | SEQ ID NO: 31 | MOUSE GENOMIC SEQUENCE |
| mR19-004.1 | SEQ ID NO: 32 | MOUSE mRNA SEQUENCE |
| mP19-004.1 | SEQ ID NO: 33 | MOUSE PROTEIN SEQUENCE |
| mR19-004.2 | SEQ ID NO: 34 | MOUSE mRNA SEQUENCE |
| mP19-004.2 | SEQ ID NO: 35 | MOUSE PROTEIN SEQUENCE |
| hD19-004 | SEQ ID NO: 36 | HUMAN GENOMIC SEQUENCE |
| hR19-004.1 | SEQ ID NO: 37 | HUMAN mRNA SEQUENCE |
| hP19-004.1 | SEQ ID NO: 38 | HUMAN PROTEIN SEQUENCE |
| hR19-004.2 | SEQ ID NO: 39 | HUMAN mRNA SEQUENCE |
| hP19-004.2 | SEQ ID NO: 40 | HUMAN PROTEIN SEQUENCE |
| mD19-005 | SEQ ID NO: 41 | MOUSE GENOMIC SEQUENCE |
| mR19-005.1 | SEQ ID NO: 42 | MOUSE mRNA SEQUENCE |
| mP19-005.1 | SEQ ID NO: 43 | MOUSE PROTEIN SEQUENCE |
| hD19-005 | SEQ ID NO: 44 | HUMAN GENOMIC SEQUENCE |
| hR19-005.1 | SEQ ID NO: 45 | HUMAN mRNA SEQUENCE |
| hP19-005.1 | SEQ ID NO: 46 | HUMAN PROTEIN SEQUENCE |
| hR19-005.2 | SEQ ID NO: 47 | HUMAN mRNA SEQUENCE |
| hP19-005.2 | SEQ ID NO: 48 | HUMAN PROTEIN SEQUENCE |
| hR19-005.3 | SEQ ID NO: 49 | HUMAN mRNA SEQUENCE |
| hP19-005.3 | SEQ ID NO: 50 | HUMAN PROTEIN SEQUENCE |
| mD20-003 | SEQ ID NO: 51 | MOUSE GENOMIC SEQUENCE |
| mR20-003.1 | SEQ ID NO: 52 | MOUSE mRNA SEQUENCE |
| mP20-003.1 | SEQ ID NO: 53 | MOUSE PROTEIN SEQUENCE |
| hD20-003 | SEQ ID NO: 54 | HUMAN GENOMIC SEQUENCE |
| hR20-003.1 | SEQ ID NO: 55 | HUMAN mRNA SEQUENCE |
| hP20-003.1 | SEQ ID NO: 56 | HUMAN PROTEIN SEQUENCE |
| hR20-003.2 | SEQ ID NO: 57 | HUMAN mRNA SEQUENCE |
| hP20-003.2 | SEQ ID NO: 58 | HUMAN PROTEIN SEQUENCE |
| hR20-003.3 | SEQ ID NO: 59 | HUMAN mRNA SEQUENCE |
| hP20-003.3 | SEQ ID NO: 60 | HUMAN PROTEIN SEQUENCE |
| hR20-003.4 | SEQ ID NO: 61 | HUMAN mRNA SEQUENCE |
| hP20-003.4 | SEQ ID NO: 62 | HUMAN PROTEIN SEQUENCE |
| hR20-003.5 | SEQ ID NO: 63 | HUMAN mRNA SEQUENCE |
| hP20-003.5 | SEQ ID NO: 64 | HUMAN PROTEIN SEQUENCE |
| mD20-005 | SEQ ID NO: 65 | MOUSE GENOMIC SEQUENCE |
| mR20-005.1 | SEQ ID NO: 66 | MOUSE mRNA SEQUENCE |
| mP20-005.1 | SEQ ID NO: 67 | MOUSE PROTEIN SEQUENCE |
| hD20-005 | SEQ ID NO: 68 | HUMAN GENOMIC SEQUENCE |
| hR20-005.1 | SEQ ID NO: 69 | HUMAN mRNA SEQUENCE |
| hP20-005.1 | SEQ ID NO: 70 | HUMAN PROTEIN SEQUENCE |
| mD20-012 | SEQ ID NO: 71 | MOUSE GENOMIC SEQUENCE |
| mR20-012.1 | SEQ ID NO: 72 | MOUSE mRNA SEQUENCE |
| mP20-012.1 | SEQ ID NO: 73 | MOUSE PROTEIN SEQUENCE |
| hD20-012 | SEQ ID NO: 74 | HUMAN GENOMIC SEQUENCE |
| hR20-012.1 | SEQ ID NO: 75 | HUMAN mRNA SEQUENCE |
| hP20-012.1 | SEQ ID NO: 76 | HUMAN PROTEIN SEQUENCE |
| hR20-012.2 | SEQ ID NO: 77 | HUMAN mRNA SEQUENCE |
| hP20-012.2 | SEQ ID NO: 78 | HUMAN PROTEIN SEQUENCE |
| hR20-012.3 | SEQ ID NO: 79 | HUMAN mRNA SEQUENCE |
| hP20-012.3 | SEQ ID NO: 80 | HUMAN PROTEIN SEQUENCE |
| hR20-012.4 | SEQ ID NO: 81 | HUMAN mRNA SEQUENCE |
| hP20-012.4 | SEQ ID NO: 82 | HUMAN PROTEIN SEQUENCE |
| mD20-013 | SEQ ID NO: 83 | MOUSE GENOMIC SEQUENCE |
| mR20-013.1 | SEQ ID NO: 84 | MOUSE mRNA SEQUENCE |
| mP20-013.1 | SEQ ID NO: 85 | MOUSE PROTEIN SEQUENCE |
| mR20-013.2 | SEQ ID NO: 86 | MOUSE mRNA SEQUENCE |
| mP20-013.2 | SEQ ID NO: 87 | MOUSE PROTEIN SEQUENCE |
| mD20-014 | SEQ ID NO: 88 | MOUSE GENOMIC SEQUENCE |
| mR20-014.1 | SEQ ID NO: 89 | MOUSE mRNA SEQUENCE |
| mP20-014.1 | SEQ ID NO: 90 | MOUSE PROTEIN SEQUENCE |
| hD20-014 | SEQ ID NO: 91 | HUMAN GENOMIC SEQUENCE |
| hR20-014.1 | SEQ ID NO: 92 | HUMAN mRNA SEQUENCE |
| hP20-014.1 | SEQ ID NO: 93 | HUMAN PROTEIN SEQUENCE |
| hR20-014.2 | SEQ ID NO: 94 | HUMAN mRNA SEQUENCE |
| hP20-014.2 | SEQ ID NO: 95 | HUMAN PROTEIN SEQUENCE |
| hR20-014.3 | SEQ ID NO: 96 | HUMAN mRNA SEQUENCE |
| hP20-014.3 | SEQ ID NO: 97 | HUMAN PROTEIN SEQUENCE |
| hR20-014.4 | SEQ ID NO: 98 | HUMAN mRNA SEQUENCE |
| hP20-014.4 | SEQ ID NO: 99 | HUMAN PROTEIN SEQUENCE |
| hR20-014.5 | SEQ ID NO: 100 | HUMAN mRNA SEQUENCE |
| hP20-014.5 | SEQ ID NO: 101 | HUMAN PROTEIN SEQUENCE |
| mD20-015 | SEQ ID NO: 102 | MOUSE GENOMIC SEQUENCE |
| mR20-015.1 | SEQ ID NO: 103 | MOUSE mRNA SEQUENCE |
| mP20-015.1 | SEQ ID NO: 104 | MOUSE PROTEIN SEQUENCE |
| hD20-015 | SEQ ID NO: 105 | HUMAN GENOMIC SEQUENCE |
| hR20-015.1 | SEQ ID NO: 106 | HUMAN mRNA SEQUENCE |
| hP20-015.1 | SEQ ID NO: 107 | HUMAN PROTEIN SEQUENCE |
| hR20-015.2 | SEQ ID NO: 108 | HUMAN mRNA SEQUENCE |
| hP20-015.2 | SEQ ID NO: 109 | HUMAN PROTEIN SEQUENCE |
| hR20-015.3 | SEQ ID NO: 110 | HUMAN mRNA SEQUENCE |
| hP20-015.3 | SEQ ID NO: 111 | HUMAN PROTEIN SEQUENCE |
| mD20-016 | SEQ ID NO: 112 | MOUSE GENOMIC SEQUENCE |
| mR20-016.1 | SEQ ID NO: 113 | MOUSE mRNA SEQUENCE |
| mP20-016.1 | SEQ ID NO: 114 | MOUSE PROTEIN SEQUENCE |
| hD20-016 | SEQ ID NO: 115 | HUMAN GENOMIC SEQUENCE |
| hR20-016.1 | SEQ ID NO: 116 | HUMAN mRNA SEQUENCE |
| hP20-016.1 | SEQ ID NO: 117 | HUMAN PROTEIN SEQUENCE |
| hR20-016.2 | SEQ ID NO: 118 | HUMAN mRNA SEQUENCE |
| hP20-016.2 | SEQ ID NO: 119 | HUMAN PROTEIN SEQUENCE |
| hR20-016.3 | SEQ ID NO: 120 | HUMAN mRNA SEQUENCE |
| hP20-016.3 | SEQ ID NO: 121 | HUMAN PROTEIN SEQUENCE |
| hR20-016.4 | SEQ ID NO: 122 | HUMAN mRNA SEQUENCE |
| hP20-016.4 | SEQ ID NO: 123 | HUMAN PROTEIN SEQUENCE |
| hR20-016.5 | SEQ ID NO: 124 | HUMAN mRNA SEQUENCE |
| hP20-016.5 | SEQ ID NO: 125 | HUMAN PROTEIN SEQUENCE |
| hR20-016.6 | SEQ ID NO: 126 | HUMAN mRNA SEQUENCE |
| hP20-016.6 | SEQ ID NO: 127 | HUMAN PROTEIN SEQUENCE |
| hR20-016.7 | SEQ ID NO: 128 | HUMAN mRNA SEQUENCE |
| hP20-016.7 | SEQ ID NO: 129 | HUMAN PROTEIN SEQUENCE |
| hR20-016.8 | SEQ ID NO: 130 | HUMAN mRNA SEQUENCE |
| hP20-016.8 | SEQ ID NO: 131 | HUMAN PROTEIN SEQUENCE |
| hR20-016.9 | SEQ ID NO: 132 | HUMAN mRNA SEQUENCE |
| hP20-016.9 | SEQ ID NO: 133 | HUMAN PROTEIN SEQUENCE |
| hR20-016.10 | SEQ ID NO: 134 | HUMAN mRNA SEQUENCE |
| hP20-016.10 | SEQ ID NO: 135 | HUMAN PROTEIN SEQUENCE |
| hR20-016.11 | SEQ ID NO: 136 | HUMAN mRNA SEQUENCE |
| hP20-016.11 | SEQ ID NO: 137 | HUMAN PROTEIN SEQUENCE |
| hR20-016.12 | SEQ ID NO: 138 | HUMAN mRNA SEQUENCE |
| hP20-016.12 | SEQ ID NO: 139 | HUMAN PROTEIN SEQUENCE |
| hR20-016.13 | SEQ ID NO: 140 | HUMAN mRNA SEQUENCE |
| hP20-016.13 | SEQ ID NO: 141 | HUMAN PROTEIN SEQUENCE |
| mD20-017 | SEQ ID NO: 142 | MOUSE GENOMIC SEQUENCE |
| mR20-017.1 | SEQ ID NO: 143 | MOUSE mRNA SEQUENCE |
| mP20-017.1 | SEQ ID NO: 144 | MOUSE PROTEIN SEQUENCE |
| mR20-017.2 | SEQ ID NO: 145 | MOUSE mRNA SEQUENCE |
| mP20-017.2 | SEQ ID NO: 146 | MOUSE PROTEIN SEQUENCE |
| mR20-017.3 | SEQ ID NO: 147 | MOUSE mRNA SEQUENCE |
| mP20-017.3 | SEQ ID NO: 148 | MOUSE PROTEIN SEQUENCE |
| hD20-017 | SEQ ID NO: 149 | HUMAN GENOMIC SEQUENCE |
| hR20-017.1 | SEQ ID NO: 150 | HUMAN mRNA SEQUENCE |
| hP20-017.1 | SEQ ID NO: 151 | HUMAN PROTEIN SEQUENCE |
| hR20-017.2 | SEQ ID NO: 152 | HUMAN mRNA SEQUENCE |
| hP20-017.2 | SEQ ID NO: 153 | HUMAN PROTEIN SEQUENCE |
| mD20-019 | SEQ ID NO: 154 | MOUSE GENOMIC SEQUENCE |
| mR20-019.1 | SEQ ID NO: 155 | MOUSE mRNA SEQUENCE |
| mP20-019.1 | SEQ ID NO: 156 | MOUSE PROTEIN SEQUENCE |
| mR20-019.2 | SEQ ID NO: 157 | MOUSE mRNA SEQUENCE |
| mP20-019.2 | SEQ ID NO: 158 | MOUSE PROTEIN SEQUENCE |
| hD20-019 | SEQ ID NO: 159 | HUMAN GENOMIC SEQUENCE |
| hR20-019.1 | SEQ ID NO: 160 | HUMAN mRNA SEQUENCE |
| hP20-019.1 | SEQ ID NO: 161 | HUMAN PROTEIN SEQUENCE |
| mD20-020 | SEQ ID NO: 162 | MOUSE GENOMIC SEQUENCE |
| mR20-020.1 | SEQ ID NO: 163 | MOUSE mRNA SEQUENCE |
| mP20-020.1 | SEQ ID NO: 164 | MOUSE PROTEIN SEQUENCE |
| hD20-020 | SEQ ID NO: 165 | HUMAN GENOMIC SEQUENCE |
| hR20-020.1 | SEQ ID NO: 166 | HUMAN mRNA SEQUENCE |
| hP20-020.1 | SEQ ID NO: 167 | HUMAN PROTEIN SEQUENCE |
| hR20-020.2 | SEQ ID NO: 168 | HUMAN mRNA SEQUENCE |
| hP20-020.2 | SEQ ID NO: 169 | HUMAN PROTEIN SEQUENCE |
| hR20-020.3 | SEQ ID NO: 170 | HUMAN mRNA SEQUENCE |
| hP20-020.3 | SEQ ID NO: 171 | HUMAN PROTEIN SEQUENCE |
| hR20-020.4 | SEQ ID NO: 172 | HUMAN mRNA SEQUENCE |
| hP20-020.4 | SEQ ID NO: 173 | HUMAN PROTEIN SEQUENCE |
| hR20-020.5 | SEQ ID NO: 174 | HUMAN mRNA SEQUENCE |
| hP20-020.5 | SEQ ID NO: 175 | HUMAN PROTEIN SEQUENCE |
| hR20-020.6 | SEQ ID NO: 176 | HUMAN mRNA SEQUENCE |
| hP20-020.6 | SEQ ID NO: 177 | HUMAN PROTEIN SEQUENCE |
| hR20-020.7 | SEQ ID NO: 178 | HUMAN mRNA SEQUENCE |
| hP20-020.7 | SEQ ID NO: 179 | HUMAN PROTEIN SEQUENCE |
| hR20-020.8 | SEQ ID NO: 180 | HUMAN mRNA SEQUENCE |
| hP20-020.8 | SEQ ID NO: 181 | HUMAN PROTEIN SEQUENCE |
| mD20-022 | SEQ ID NO: 182 | MOUSE GENOMIC SEQUENCE |
| mR20-022.1 | SEQ ID NO: 183 | MOUSE mRNA SEQUENCE |
| mP20-022.1 | SEQ ID NO: 184 | MOUSE PROTEIN SEQUENCE |
| mR20-022.2 | SEQ ID NO: 185 | MOUSE mRNA SEQUENCE |
| mP20-022.2 | SEQ ID NO: 186 | MOUSE PROTEIN SEQUENCE |
| mR20-022.3 | SEQ ID NO: 187 | MOUSE mRNA SEQUENCE |
| mP20-022.3 | SEQ ID NO: 188 | MOUSE PROTEIN SEQUENCE |
| hD20-022 | SEQ ID NO: 189 | HUMAN GENOMIC SEQUENCE |
| hR20-022.1 | SEQ ID NO: 190 | HUMAN mRNA SEQUENCE |
| hP20-022.1 | SEQ ID NO: 191 | HUMAN PROTEIN SEQUENCE |
| hR20-022.2 | SEQ ID NO: 192 | HUMAN mRNA SEQUENCE |
| hP20-022.2 | SEQ ID NO: 193 | HUMAN PROTEIN SEQUENCE |
| hR20-022.3 | SEQ ID NO: 194 | HUMAN mRNA SEQUENCE |
| hP20-022.3 | SEQ ID NO: 195 | HUMAN PROTEIN SEQUENCE |
| mD20-023 | SEQ ID NO: 196 | MOUSE GENOMIC SEQUENCE |
| mR20-023.1 | SEQ ID NO: 197 | MOUSE mRNA SEQUENCE |
| mP20-023.1 | SEQ ID NO: 198 | MOUSE PROTEIN SEQUENCE |
| mR20-023.2 | SEQ ID NO: 199 | MOUSE mRNA SEQUENCE |
| mP20-023.2 | SEQ ID NO: 200 | MOUSE PROTEIN SEQUENCE |
| mR20-023.3 | SEQ ID NO: 201 | MOUSE mRNA SEQUENCE |
| mP20-023.3 | SEQ ID NO: 202 | MOUSE PROTEIN SEQUENCE |
| hD20-023 | SEQ ID NO: 203 | HUMAN GENOMIC SEQUENCE |
| hR20-023.1 | SEQ ID NO: 204 | HUMAN mRNA SEQUENCE |
| hP20-023.1 | SEQ ID NO: 205 | HUMAN PROTEIN SEQUENCE |
| hR20-023.2 | SEQ ID NO: 206 | HUMAN mRNA SEQUENCE |
| hP20-023.2 | SEQ ID NO: 207 | HUMAN PROTEIN SEQUENCE |
| hR20-023.3 | SEQ ID NO: 208 | HUMAN mRNA SEQUENCE |
| hP20-023.3 | SEQ ID NO: 209 | HUMAN PROTEIN SEQUENCE |
| hR20-023.4 | SEQ ID NO: 210 | HUMAN mRNA SEQUENCE |
| hP20-023.4 | SEQ ID NO: 211 | HUMAN PROTEIN SEQUENCE |
| hR20-023.5 | SEQ ID NO: 212 | HUMAN mRNA SEQUENCE |
| hP20-023.5 | SEQ ID NO: 213 | HUMAN PROTEIN SEQUENCE |
| mD20-025 | SEQ ID NO: 214 | MOUSE GENOMIC SEQUENCE |
| mR20-025.1 | SEQ ID NO: 215 | MOUSE mRNA SEQUENCE |
| mP20-025.1 | SEQ ID NO: 216 | MOUSE PROTEIN SEQUENCE |
| hD20-025 | SEQ ID NO: 217 | HUMAN GENOMIC SEQUENCE |
| hR20-025.1 | SEQ ID NO: 218 | HUMAN mRNA SEQUENCE |
| hP20-025.1 | SEQ ID NO: 219 | HUMAN PROTEIN SEQUENCE |
| hR20-025.2 | SEQ ID NO: 220 | HUMAN mRNA SEQUENCE |
| hP20-025.2 | SEQ ID NO: 221 | HUMAN PROTEIN SEQUENCE |
| hR20-025.3 | SEQ ID NO: 222 | HUMAN mRNA SEQUENCE |
| hP20-025.3 | SEQ ID NO: 223 | HUMAN PROTEIN SEQUENCE |
| hR20-025.4 | SEQ ID NO: 224 | HUMAN mRNA SEQUENCE |
| hP20-025.4 | SEQ ID NO: 225 | HUMAN PROTEIN SEQUENCE |
| mD20-026 | SEQ ID NO: 226 | MOUSE GENOMIC SEQUENCE |
| mR20-026.1 | SEQ ID NO: 227 | MOUSE mRNA SEQUENCE |
| mP20-026.1 | SEQ ID NO: 228 | MOUSE PROTEIN SEQUENCE |
| hD20-026 | SEQ ID NO: 229 | HUMAN GENOMIC SEQUENCE |
| hR20-026.1 | SEQ ID NO: 230 | HUMAN mRNA SEQUENCE |
| hP20-026.1 | SEQ ID NO: 231 | HUMAN PROTEIN SEQUENCE |
| hR20-026.2 | SEQ ID NO: 232 | HUMAN mRNA SEQUENCE |
| hP20-026.2 | SEQ ID NO: 233 | HUMAN PROTEIN SEQUENCE |
| hR20-026.3 | SEQ ID NO: 234 | HUMAN mRNA SEQUENCE |
| hP20-026.3 | SEQ ID NO: 235 | HUMAN PROTEIN SEQUENCE |
| mD20-028 | SEQ ID NO: 236 | MOUSE GENOMIC SEQUENCE |
| mR20-028.1 | SEQ ID NO: 237 | MOUSE mRNA SEQUENCE |
| mP20-028.1 | SEQ ID NO: 238 | MOUSE PROTEIN SEQUENCE |
| hD20-028 | SEQ ID NO: 239 | HUMAN GENOMIC SEQUENCE |
| hR20-028.1 | SEQ ID NO: 240 | HUMAN mRNA SEQUENCE |
| hP20-028.1 | SEQ ID NO: 241 | HUMAN PROTEIN SEQUENCE |
| hR20-028.2 | SEQ ID NO: 242 | HUMAN mRNA SEQUENCE |
| hP20-028.2 | SEQ ID NO: 243 | HUMAN PROTEIN SEQUENCE |
| hR20-028.3 | SEQ ID NO: 244 | HUMAN mRNA SEQUENCE |
| hP20-028.3 | SEQ ID NO: 245 | HUMAN PROTEIN SEQUENCE |
| mD20-031 | SEQ ID NO: 246 | MOUSE GENOMIC SEQUENCE |
| mR20-031.1 | SEQ ID NO: 247 | MOUSE mRNA SEQUENCE |
| mP20-031.1 | SEQ ID NO: 248 | MOUSE PROTEIN SEQUENCE |
| hD20-031 | SEQ ID NO: 249 | HUMAN GENOMIC SEQUENCE |
| hR20-031.1 | SEQ ID NO: 250 | HUMAN mRNA SEQUENCE |
| hP20-031.1 | SEQ ID NO: 251 | HUMAN PROTEIN SEQUENCE |
| mD20-032 | SEQ ID NO: 252 | MOUSE GENOMIC SEQUENCE |
| mR20-032.1 | SEQ ID NO: 253 | MOUSE mRNA SEQUENCE |
| mP20-032.1 | SEQ ID NO: 254 | MOUSE PROTEIN SEQUENCE |
| mR20-032.2 | SEQ ID NO: 255 | MOUSE mRNA SEQUENCE |
| mP20-032.2 | SEQ ID NO: 256 | MOUSE PROTEIN SEQUENCE |
| hD20-032 | SEQ ID NO: 257 | HUMAN GENOMIC SEQUENCE |
| hR20-032.1 | SEQ ID NO: 258 | HUMAN mRNA SEQUENCE |
| hP20-032.1 | SEQ ID NO: 259 | HUMAN PROTEIN SEQUENCE |
| hR20-032.2 | SEQ ID NO: 260 | HUMAN mRNA SEQUENCE |
| hP20-032.2 | SEQ ID NO: 261 | HUMAN PROTEIN SEQUENCE |
| mD20-034 | SEQ ID NO: 262 | MOUSE GENOMIC SEQUENCE |
| mR20-034.1 | SEQ ID NO: 263 | MOUSE mRNA SEQUENCE |
| mP20-034.1 | SEQ ID NO: 264 | MOUSE PROTEIN SEQUENCE |
| mR20-034.2 | SEQ ID NO: 265 | MOUSE mRNA SEQUENCE |
| mP20-034.2 | SEQ ID NO: 266 | MOUSE PROTEIN SEQUENCE |
| hD20-034 | SEQ ID NO: 267 | HUMAN GENOMIC SEQUENCE |
| hR20-034.1 | SEQ ID NO: 268 | HUMAN mRNA SEQUENCE |
| hP20-034.1 | SEQ ID NO: 269 | HUMAN PROTEIN SEQUENCE |
| mD20-035 | SEQ ID NO: 270 | MOUSE GENOMIC SEQUENCE |
| mR20-035.1 | SEQ ID NO: 271 | MOUSE mRNA SEQUENCE |
| mP20-035.1 | SEQ ID NO: 272 | MOUSE PROTEIN SEQUENCE |
| hD20-035 | SEQ ID NO: 273 | HUMAN GENOMIC SEQUENCE |
| hR20-035.1 | SEQ ID NO: 274 | HUMAN mRNA SEQUENCE |
| hP20-035.1 | SEQ ID NO: 275 | HUMAN PROTEIN SEQUENCE |
| mD20-036 | SEQ ID NO: 276 | MOUSE GENOMIC SEQUENCE |
| mR20-036.1 | SEQ ID NO: 277 | MOUSE mRNA SEQUENCE |
| mP20-036.1 | SEQ ID NO: 278 | MOUSE PROTEIN SEQUENCE |
| mR20-036.2 | SEQ ID NO: 279 | MOUSE mRNA SEQUENCE |
| mP20-036.2 | SEQ ID NO: 280 | MOUSE PROTEIN SEQUENCE |
| hD20-036 | SEQ ID NO: 281 | HUMAN GENOMIC SEQUENCE |
| hR20-036.1 | SEQ ID NO: 282 | HUMAN mRNA SEQUENCE |
| hP20-036.1 | SEQ ID NO: 283 | HUMAN PROTEIN SEQUENCE |
| hR20-036.2 | SEQ ID NO: 284 | HUMAN mRNA SEQUENCE |
| hP20-036.2 | SEQ ID NO: 285 | HUMAN PROTEIN SEQUENCE |
| hR20-036.3 | SEQ ID NO: 286 | HUMAN mRNA SEQUENCE |
| hP20-036.3 | SEQ ID NO: 287 | HUMAN PROTEIN SEQUENCE |
| hD21-001 | SEQ ID NO: 288 | HUMAN GENOMIC SEQUENCE |
| hR21-001.1 | SEQ ID NO: 289 | HUMAN mRNA SEQUENCE |
| hP21-001.1 | SEQ ID NO: 290 | HUMAN PROTEIN SEQUENCE |
| mD21-003 | SEQ ID NO: 291 | MOUSE GENOMIC SEQUENCE |
| mR21-003.1 | SEQ ID NO: 292 | MOUSE mRNA SEQUENCE |
| mP21-003.1 | SEQ ID NO: 293 | MOUSE PROTEIN SEQUENCE |
| mR21-003.2 | SEQ ID NO: 294 | MOUSE mRNA SEQUENCE |
| mP21-003.2 | SEQ ID NO: 295 | MOUSE PROTEIN SEQUENCE |
| hD21-003 | SEQ ID NO: 296 | HUMAN GENOMIC SEQUENCE |
| hR21-003.1 | SEQ ID NO: 297 | HUMAN mRNA SEQUENCE |
| hP21-003.1 | SEQ ID NO: 298 | HUMAN PROTEIN SEQUENCE |
| mD21-004 | SEQ ID NO: 299 | MOUSE GENOMIC SEQUENCE |
| mR21-004.1 | SEQ ID NO: 300 | MOUSE mRNA SEQUENCE |
| mP21-004.1 | SEQ ID NO: 301 | MOUSE PROTEIN SEQUENCE |
| mR21-004.2 | SEQ ID NO: 302 | MOUSE mRNA SEQUENCE |
| mP21-004.2 | SEQ ID NO: 303 | MOUSE PROTEIN SEQUENCE |
| mR21-004.3 | SEQ ID NO: 304 | MOUSE mRNA SEQUENCE |
| mP21-004.3 | SEQ ID NO: 305 | MOUSE PROTEIN SEQUENCE |
| hD21-004 | SEQ ID NO: 306 | HUMAN GENOMIC SEQUENCE |
| hR21-004.1 | SEQ ID NO: 307 | HUMAN mRNA SEQUENCE |
| hP21-004.1 | SEQ ID NO: 308 | HUMAN PROTEIN SEQUENCE |
| mD21-005 | SEQ ID NO: 309 | MOUSE GENOMIC SEQUENCE |
| mR21-005.1 | SEQ ID NO: 310 | MOUSE mRNA SEQUENCE |
| mP21-005.1 | SEQ ID NO: 311 | MOUSE PROTEIN SEQUENCE |
| mR21-005.2 | SEQ ID NO: 312 | MOUSE mRNA SEQUENCE |
| mP21-005.2 | SEQ ID NO: 313 | MOUSE PROTEIN SEQUENCE |
| hD21-005 | SEQ ID NO: 314 | HUMAN GENOMIC SEQUENCE |
| hR21-005.1 | SEQ ID NO: 315 | HUMAN mRNA SEQUENCE |
| hP21-005.1 | SEQ ID NO: 316 | HUMAN PROTEIN SEQUENCE |
| hR21-005.2 | SEQ ID NO: 317 | HUMAN mRNA SEQUENCE |
| hP21-005.2 | SEQ ID NO: 318 | HUMAN PROTEIN SEQUENCE |
| hR21-005.3 | SEQ ID NO: 319 | HUMAN mRNA SEQUENCE |
| hP21-005.3 | SEQ ID NO: 320 | HUMAN PROTEIN SEQUENCE |
| hR21-005.4 | SEQ ID NO: 321 | HUMAN mRNA SEQUENCE |
| hP21-005.4 | SEQ ID NO: 322 | HUMAN PROTEIN SEQUENCE |
| mD21-006 | SEQ ID NO: 323 | MOUSE GENOMIC SEQUENCE |
| mR21-006.1 | SEQ ID NO: 324 | MOUSE mRNA SEQUENCE |
| mP21-006.1 | SEQ ID NO: 325 | MOUSE PROTEIN SEQUENCE |
| hD21-006 | SEQ ID NO: 326 | HUMAN GENOMIC SEQUENCE |
| hR21-006.1 | SEQ ID NO: 327 | HUMAN mRNA SEQUENCE |
| hP21-006.1 | SEQ ID NO: 328 | HUMAN PROTEIN SEQUENCE |
| hR21-006.2 | SEQ ID NO: 329 | HUMAN mRNA SEQUENCE |
| hP21-006.2 | SEQ ID NO: 330 | HUMAN PROTEIN SEQUENCE |
| mD21-007 | SEQ ID NO: 331 | MOUSE GENOMIC SEQUENCE |
| mR21-007.1 | SEQ ID NO: 332 | MOUSE mRNA SEQUENCE |
| mP21-007.1 | SEQ ID NO: 333 | MOUSE PROTEIN SEQUENCE |
| mR21-007.2 | SEQ ID NO: 334 | MOUSE mRNA SEQUENCE |
| mP21-007.2 | SEQ ID NO: 335 | MOUSE PROTEIN SEQUENCE |
| hD21-007 | SEQ ID NO: 336 | HUMAN GENOMIC SEQUENCE |
| hR21-007.1 | SEQ ID NO: 337 | HUMAN mRNA SEQUENCE |
| hP21-007.1 | SEQ ID NO: 338 | HUMAN PROTEIN SEQUENCE |
| hR21-007.2 | SEQ ID NO: 339 | HUMAN mRNA SEQUENCE |
| hP21-007.2 | SEQ ID NO: 340 | HUMAN PROTEIN SEQUENCE |
| mD21-010 | SEQ ID NO: 341 | MOUSE GENOMIC SEQUENCE |
| mR21-010.1 | SEQ ID NO: 342 | MOUSE mRNA SEQUENCE |
| mP21-010.1 | SEQ ID NO: 343 | MOUSE PROTEIN SEQUENCE |
| mR21-010.2 | SEQ ID NO: 344 | MOUSE mRNA SEQUENCE |
| mP21-010.2 | SEQ ID NO: 345 | MOUSE PROTEIN SEQUENCE |
| mR21-010.3 | SEQ ID NO: 346 | MOUSE mRNA SEQUENCE |
| mP21-010.3 | SEQ ID NO: 347 | MOUSE PROTEIN SEQUENCE |
| hD21-010 | SEQ ID NO: 348 | HUMAN GENOMIC SEQUENCE |
| hR21-010.1 | SEQ ID NO: 349 | HUMAN mRNA SEQUENCE |
| hP21-010.1 | SEQ ID NO: 350 | HUMAN PROTEIN SEQUENCE |
| hR21-010.2 | SEQ ID NO: 351 | HUMAN mRNA SEQUENCE |
| hP21-010.2 | SEQ ID NO: 352 | HUMAN PROTEIN SEQUENCE |
| mD21-011 | SEQ ID NO: 353 | MOUSE GENOMIC SEQUENCE |
| mR21-011.1 | SEQ ID NO: 354 | MOUSE mRNA SEQUENCE |
| mP21-011.1 | SEQ ID NO: 355 | MOUSE PROTEIN SEQUENCE |
| mR21-011.2 | SEQ ID NO: 356 | MOUSE mRNA SEQUENCE |
| mP21-011.2 | SEQ ID NO: 357 | MOUSE PROTEIN SEQUENCE |
| mD21-013 | SEQ ID NO: 358 | MOUSE GENOMIC SEQUENCE |
| mR21-013.1 | SEQ ID NO: 359 | MOUSE mRNA SEQUENCE |
| mP21-013.1 | SEQ ID NO: 360 | MOUSE PROTEIN SEQUENCE |
| mD21-016 | SEQ ID NO: 361 | MOUSE GENOMIC SEQUENCE |
| mR21-016.1 | SEQ ID NO: 362 | MOUSE mRNA SEQUENCE |
| mP21-016.1 | SEQ ID NO: 363 | MOUSE PROTEIN SEQUENCE |
| mR21-016.2 | SEQ ID NO: 364 | MOUSE mRNA SEQUENCE |
| mP21-016.2 | SEQ ID NO: 365 | MOUSE PROTEIN SEQUENCE |
| hD21-016 | SEQ ID NO: 366 | HUMAN GENOMIC SEQUENCE |
| hR21-016.1 | SEQ ID NO: 367 | HUMAN mRNA SEQUENCE |
| hP21-016.1 | SEQ ID NO: 368 | HUMAN PROTEIN SEQUENCE |
| hR21-016.2 | SEQ ID NO: 369 | HUMAN mRNA SEQUENCE |
| hP21-016.2 | SEQ ID NO: 370 | HUMAN PROTEIN SEQUENCE |
| mD21-018 | SEQ ID NO: 371 | MOUSE GENOMIC SEQUENCE |
| mR21-018.1 | SEQ ID NO: 372 | MOUSE mRNA SEQUENCE |
| mP21-018.1 | SEQ ID NO: 373 | MOUSE PROTEIN SEQUENCE |
| mD21-019 | SEQ ID NO: 374 | MOUSE GENOMIC SEQUENCE |
| mR21-019.1 | SEQ ID NO: 375 | MOUSE mRNA SEQUENCE |
| mP21-019.1 | SEQ ID NO: 376 | MOUSE PROTEIN SEQUENCE |
| hD21-019 | SEQ ID NO: 377 | HUMAN GENOMIC SEQUENCE |
| hR21-019.1 | SEQ ID NO: 378 | HUMAN mRNA SEQUENCE |
| hP21-019.1 | SEQ ID NO: 379 | HUMAN PROTEIN SEQUENCE |
| mD21-022 | SEQ ID NO: 380 | MOUSE GENOMIC SEQUENCE |
| mR21-022.1 | SEQ ID NO: 381 | MOUSE mRNA SEQUENCE |
| mP21-022.1 | SEQ ID NO: 382 | MOUSE PROTEIN SEQUENCE |
| hD21-022 | SEQ ID NO: 383 | HUMAN GENOMIC SEQUENCE |
| hR21-022.1 | SEQ ID NO: 384 | HUMAN mRNA SEQUENCE |
| hP21-022.1 | SEQ ID NO: 385 | HUMAN PROTEIN SEQUENCE |
| hD21-023 | SEQ ID NO: 386 | HUMAN GENOMIC SEQUENCE |
| hR21-023.1 | SEQ ID NO: 387 | HUMAN mRNA SEQUENCE |
| hP21-023.1 | SEQ ID NO: 388 | HUMAN PROTEIN SEQUENCE |
| hD21-023 | SEQ ID NO: 389 | HUMAN GENOMIC SEQUENCE |
| hR21-023.1 | SEQ ID NO: 390 | HUMAN mRNA SEQUENCE |
| hP21-023.1 | SEQ ID NO: 391 | HUMAN PROTEIN SEQUENCE |
| hR21-023.2 | SEQ ID NO: 392 | HUMAN mRNA SEQUENCE |
| hP21-023.2 | SEQ ID NO: 393 | HUMAN PROTEIN SEQUENCE |
| hR21-023.3 | SEQ ID NO: 394 | HUMAN mRNA SEQUENCE |
| hP21-023.3 | SEQ ID NO: 395 | HUMAN PROTEIN SEQUENCE |
| mD21-027 | SEQ ID NO: 396 | MOUSE GENOMIC SEQUENCE |
| mR21-027.1 | SEQ ID NO: 397 | MOUSE mRNA SEQUENCE |
| mP21-027.1 | SEQ ID NO: 398 | MOUSE PROTEIN SEQUENCE |
| hD21-027 | SEQ ID NO: 399 | HUMAN GENOMIC SEQUENCE |
| hR21-027.1 | SEQ ID NO: 400 | HUMAN mRNA SEQUENCE |
| hP21-027.1 | SEQ ID NO: 401 | HUMAN PROTEIN SEQUENCE |
| hR21-027.2 | SEQ ID NO: 402 | HUMAN mRNA SEQUENCE |
| hP21-027.2 | SEQ ID NO: 403 | HUMAN PROTEIN SEQUENCE |
| hR21-027.3 | SEQ ID NO: 404 | HUMAN mRNA SEQUENCE |
| hP21-027.3 | SEQ ID NO: 405 | HUMAN PROTEIN SEQUENCE |
| mD21-030 | SEQ ID NO: 406 | MOUSE GENOMIC SEQUENCE |
| mR21-030.1 | SEQ ID NO: 407 | MOUSE mRNA SEQUENCE |
| mP21-030.1 | SEQ ID NO: 408 | MOUSE PROTEIN SEQUENCE |
| hD21-030 | SEQ ID NO: 409 | HUMAN GENOMIC SEQUENCE |
| hR21-030.1 | SEQ ID NO: 410 | HUMAN mRNA SEQUENCE |
| hP21-030.1 | SEQ ID NO: 411 | HUMAN PROTEIN SEQUENCE |
| hR21-030.2 | SEQ ID NO: 412 | HUMAN mRNA SEQUENCE |
| hP21-030.2 | SEQ ID NO: 413 | HUMAN PROTEIN SEQUENCE |
| mD21-031 | SEQ ID NO: 414 | MOUSE GENOMIC SEQUENCE |
| mR21-031.1 | SEQ ID NO: 415 | MOUSE mRNA SEQUENCE |
| mP21-031.1 | SEQ ID NO: 416 | MOUSE PROTEIN SEQUENCE |
| hD21-031 | SEQ ID NO: 417 | HUMAN GENOMIC SEQUENCE |
| hR21-031.1 | SEQ ID NO: 418 | HUMAN mRNA SEQUENCE |
| hP21-031.1 | SEQ ID NO: 419 | HUMAN PROTEIN SEQUENCE |
| hR21-031.2 | SEQ ID NO: 420 | HUMAN mRNA SEQUENCE |
| hP21-031.2 | SEQ ID NO: 421 | HUMAN PROTEIN SEQUENCE |
| hR21-031.3 | SEQ ID NO: 422 | HUMAN mRNA SEQUENCE |
| hP21-031.3 | SEQ ID NO: 423 | HUMAN PROTEIN SEQUENCE |
| hR21-031.4 | SEQ ID NO: 424 | HUMAN mRNA SEQUENCE |
| hP21-031.4 | SEQ ID NO: 425 | HUMAN PROTEIN SEQUENCE |
| hR21-031.5 | SEQ ID NO: 426 | HUMAN mRNA SEQUENCE |
| hP21-031.5 | SEQ ID NO: 427 | HUMAN PROTEIN SEQUENCE |
| mD21-033 | SEQ ID NO: 428 | MOUSE GENOMIC SEQUENCE |
| mR21-033.1 | SEQ ID NO: 429 | MOUSE mRNA SEQUENCE |
| mP21-033.1 | SEQ ID NO: 430 | MOUSE PROTEIN SEQUENCE |
| hD21-033 | SEQ ID NO: 431 | HUMAN GENOMIC SEQUENCE |
| hR21-033.1 | SEQ ID NO: 432 | HUMAN mRNA SEQUENCE |
| hP21-033.1 | SEQ ID NO: 433 | HUMAN PROTEIN SEQUENCE |
| hR21-033.2 | SEQ ID NO: 434 | HUMAN mRNA SEQUENCE |
| hP21-033.2 | SEQ ID NO: 435 | HUMAN PROTEIN SEQUENCE |
| hR21-033.3 | SEQ ID NO: 436 | HUMAN mRNA SEQUENCE |
| hP21-033.3 | SEQ ID NO: 437 | HUMAN PROTEIN SEQUENCE |
| hR21-033.4 | SEQ ID NO: 438 | HUMAN mRNA SEQUENCE |
| hP21-033.4 | SEQ ID NO: 439 | HUMAN PROTEIN SEQUENCE |
| mD21-034 | SEQ ID NO: 440 | MOUSE GENOMIC SEQUENCE |
| mR21-034.1 | SEQ ID NO: 441 | MOUSE mRNA SEQUENCE |
| mP21-034.1 | SEQ ID NO: 442 | MOUSE PROTEIN SEQUENCE |
| mR21-034.2 | SEQ ID NO: 443 | MOUSE mRNA SEQUENCE |
| mP21-034.2 | SEQ ID NO: 444 | MOUSE PROTEIN SEQUENCE |
| hD21-034 | SEQ ID NO: 445 | HUMAN GENOMIC SEQUENCE |
| hR21-034.1 | SEQ ID NO: 446 | HUMAN mRNA SEQUENCE |
| hP21-034.1 | SEQ ID NO: 447 | HUMAN PROTEIN SEQUENCE |
| hR21-034.2 | SEQ ID NO: 448 | HUMAN mRNA SEQUENCE |
| hP21-034.2 | SEQ ID NO: 449 | HUMAN PROTEIN SEQUENCE |
| hR21-034.3 | SEQ ID NO: 450 | HUMAN mRNA SEQUENCE |
| hP21-034.3 | SEQ ID NO: 451 | HUMAN PROTEIN SEQUENCE |
| hR21-034.4 | SEQ ID NO: 452 | HUMAN mRNA SEQUENCE |
| hP21-034.4 | SEQ ID NO: 453 | HUMAN PROTEIN SEQUENCE |
| hR21-034.5 | SEQ ID NO: 454 | HUMAN mRNA SEQUENCE |
| hP21-034.5 | SEQ ID NO: 455 | HUMAN PROTEIN SEQUENCE |
| mD21-035 | SEQ ID NO: 456 | MOUSE GENOMIC SEQUENCE |
| mR21-035.1 | SEQ ID NO: 457 | MOUSE mRNA SEQUENCE |
| mP21-035.1 | SEQ ID NO: 458 | MOUSE PROTEIN SEQUENCE |
| hD21-035 | SEQ ID NO: 459 | HUMAN GENOMIC SEQUENCE |
| hR21-035.1 | SEQ ID NO: 460 | HUMAN mRNA SEQUENCE |
| hP21-035.1 | SEQ ID NO: 461 | HUMAN PROTEIN SEQUENCE |
| hR21-035.2 | SEQ ID NO: 462 | HUMAN mRNA SEQUENCE |
| hP21-035.2 | SEQ ID NO: 463 | HUMAN PROTEIN SEQUENCE |
| hR21-035.3 | SEQ ID NO: 464 | HUMAN mRNA SEQUENCE |
| hP21-035.3 | SEQ ID NO: 465 | HUMAN PROTEIN SEQUENCE |
| mD21-038 | SEQ ID NO: 466 | MOUSE GENOMIC SEQUENCE |
| mR21-038.1 | SEQ ID NO: 467 | MOUSE mRNA SEQUENCE |
| mP21-038.1 | SEQ ID NO: 468 | MOUSE PROTEIN SEQUENCE |
| mD21-039 | SEQ ID NO: 469 | MOUSE GENOMIC SEQUENCE |
| mR21-039.1 | SEQ ID NO: 470 | MOUSE mRNA SEQUENCE |
| mP21-039.1 | SEQ ID NO: 471 | MOUSE PROTEIN SEQUENCE |
| hD21-039 | SEQ ID NO: 472 | HUMAN GENOMIC SEQUENCE |
| hR21-039.1 | SEQ ID NO: 473 | HUMAN mRNA SEQUENCE |
| hP21-039.1 | SEQ ID NO: 474 | HUMAN PROTEIN SEQUENCE |
| hR21-039.2 | SEQ ID NO: 475 | HUMAN mRNA SEQUENCE |
| hP21-039.2 | SEQ ID NO: 476 | HUMAN PROTEIN SEQUENCE |
| hR21-039.3 | SEQ ID NO: 477 | HUMAN mRNA SEQUENCE |
| hP21-039.3 | SEQ ID NO: 478 | HUMAN PROTEIN SEQUENCE |
| mD21-040 | SEQ ID NO: 479 | MOUSE GENOMIC SEQUENCE |
| mR21-040.1 | SEQ ID NO: 480 | MOUSE mRNA SEQUENCE |
| mP21-040.1 | SEQ ID NO: 481 | MOUSE PROTEIN SEQUENCE |
| hD21-040 | SEQ ID NO: 482 | HUMAN GENOMIC SEQUENCE |
| hR21-040.1 | SEQ ID NO: 483 | HUMAN mRNA SEQUENCE |
| hP21-040.1 | SEQ ID NO: 484 | HUMAN PROTEIN SEQUENCE |
| hR21-040.2 | SEQ ID NO: 485 | HUMAN mRNA SEQUENCE |
| hP21-040.2 | SEQ ID NO: 486 | HUMAN PROTEIN SEQUENCE |
| hR21-040.3 | SEQ ID NO: 487 | HUMAN mRNA SEQUENCE |
| hP21-040.3 | SEQ ID NO: 488 | HUMAN PROTEIN SEQUENCE |
| hR21-040.4 | SEQ ID NO: 489 | HUMAN mRNA SEQUENCE |
| hP21-040.4 | SEQ ID NO: 490 | HUMAN PROTEIN SEQUENCE |
| hR21-040.5 | SEQ ID NO: 491 | HUMAN mRNA SEQUENCE |
| hP21-040.5 | SEQ ID NO: 492 | HUMAN PROTEIN SEQUENCE |
| mD21-041 | SEQ ID NO: 493 | MOUSE GENOMIC SEQUENCE |
| mR21-041.1 | SEQ ID NO: 494 | MOUSE mRNA SEQUENCE |
| mP21-041.1 | SEQ ID NO: 495 | MOUSE PROTEIN SEQUENCE |
| mR21-041.2 | SEQ ID NO: 496 | MOUSE mRNA SEQUENCE |
| mP21-041.2 | SEQ ID NO: 497 | MOUSE PROTEIN SEQUENCE |
| hD21-041 | SEQ ID NO: 498 | HUMAN GENOMIC SEQUENCE |
| hR21-041.1 | SEQ ID NO: 499 | HUMAN mRNA SEQUENCE |
| hP21-041.1 | SEQ ID NO: 500 | HUMAN PROTEIN SEQUENCE |
| hR21-041.2 | SEQ ID NO: 501 | HUMAN mRNA SEQUENCE |
| hP21-041.2 | SEQ ID NO: 502 | HUMAN PROTEIN SEQUENCE |
| hR21-041.3 | SEQ ID NO: 503 | HUMAN mRNA SEQUENCE |
| hP21-041.3 | SEQ ID NO: 504 | HUMAN PROTEIN SEQUENCE |
| hR21-041.4 | SEQ ID NO: 505 | HUMAN mRNA SEQUENCE |
| hP21-041.4 | SEQ ID NO: 506 | HUMAN PROTEIN SEQUENCE |

[0310] The CA sequences were analyzed by Panther™ (Molecular Diagnostics, Palo Alto, Calif.) software designed to detect homologs and enable prediction of molecular function through a system for protein functional classification. Human Gene Ontlogy annotations were prepared in accordance with the Gene Ontology Consortium (Gene Ontology: tool for the unification of biology. The Gene Ontology Consortium Nature Genet. 25: 25-29 (2000)). Similar analysis was carried out by determining IPR information regarding the CA polypeptides from InterPro, which is an integrated documentation resource for protein families, domains and functional sites (Apweiler at al. Bioinformatics 16(12):1145-1150 (2000)).

[0311] The CA sequences may be classified according to the predicted general classifications of function by Panther™ analysis, human gene ontology and IPR domain information shown in Tables 1-336 for polypeptides having SEQ ID NOS: 14, 22, 24, 26, 32, 34, 36, 38, 40, 42, 44, 50, 52, 54, 60, 62, 64, 78, 80, 82, 88, 90, 96, 98, 100, 114, 116, 118, 128, 130, 132, 134, 136, 138, 140, 142, 148, 150, 156, 162, 164, 166, 168, 170, 172, 174, 176, 182, 184, 186, 188, 190, 192, 194, 196, 198, 200, 202, 208, 210, 212, 218, 220, 226, 228, 230, 232, 238, 240, 246, 254, 256, 262, 264, 266, 268, 274, 276, 278, 280, 286, 288, 290, 302, 308, 310, 312, 318, 320, 322, 328, 334, 336, 345, 347, 349, 351, 353, 355, 365, 367, 377, 379, 381, 383, 385, 387, 389, 391, 397, 409, 411, 417, 419, 427, 433, 435, 437, 439, 441, 443, 449, 460, 462, 464, 470, 472, 478, 484, 486, 492, 494, 496, 498, 504, 506, 508, 510, 512, 518, 520, 522, 524, 526, 532, 534, 536, 542, 544, 550, 556, 558, 560, 562, 564, 566, 574, 576, 578, 580, 582, 590, 592, 598, 600, 606, 608, 614, 616, 622, 628, 630, 632, 638, 644, 646, 648, 650, 652, 654, 656, 658, 669, 675, 681, 683, 689, 698, 704, 710, 712, 718, 720, 722, 728, 730, 732, 734, 740, 742, 744, 750, 752, 758, 760, 766, 768, 774, 776, 784, 786, 788, 794, 796, 798, 804, 806, 808, 810, 812, 822, 824, 826, 832, 834, 836, 838, 840, 842, 844, 850, 852, 854, 868, 870, 876, 878, 880, 882, 884, 896, 902, 904, 910, 912, 914, 920, 922, 928, 930, 932, 938, 944, 946, 952, 954, 956, 962, 964, 970, 972, 974, 976, 982, 984, 986, 988, 1000, 1002, 1004, 1006, 1008, 1014, 1016, 1018, 1020, 1022, 1028, 1030, 1036, 1038, 1040, 1042, 1044, 1050, 1059, 1061, 1063, 1065, 1067, 1069, 1071, 1073, 1079, 1081, 1083, 1089, 1091, 1097, 1103, 1109, 1111, 1113, 1115, 1117, 1123, 1129, 1135, 1137, 1143, 1145, 1151, 1157, 1159, 1161, 1167, 1169, 1175, 1177, 1179, 1185, 1187, 1193, 1195, 1197, 1209, 1211, 1213, 1219, 1221, 1227, 1229, 1231, 1233, 1239, 1245, 1247, 1249, 1255, 1257, 1259, 1261, 1263, 1265, 1267, 1273, 1275, 1277, 1279, 1281, 1283, 1289, 1291, 1293, 1295, 1297, 1303, 1305, 1311, 1313, 1315, 1317, 1329, 1335, 1337, 1339, 1341, 1349, 1351, 1357, 1363, 1369, 1371, 1373, 1375, 1381, 1383, 1385, 1391, 1393, 1399, 1402, 1404, 1406, 1408, 1410, 1418, 1420, 1422, 1424, 1426, 1428, 1438, 1440, 1442, 1444, 1446, 1448, 1450, 1452, 1458, 1464, 1466, 1468, 1470, 1476, 1484, 1486, 1492, 1501, 1503, 1509, 1511, 1517, 1519, 1521, 1523, 1525, 1535, 1541, 1543, 1551, 1553, 1555, 1561, 1563, 1565, 1567, 1573, 1575, 1581, 1583, 1585, 1591, 1593, 1605, 1607, 1609, 1611, 1613, 1615, 1621, 1627, 1629, 1635, 1637, 1645, 1651, 1659, 1661, 1663, 1665, 1671, 1677, 1679, 1681, 1687, 1693, 1695, 1701, 1703, 1705, 1707, 1713, 1715, 1721, 1723, 1733, 1735, 1737, 1739, 1745, 1747, 1753, 1755, 1766, 1768, 1774, 1776, 1778, 1780, 1782, 1795, 1801, 1803, 1805, 1807, 1813, 1819, 1821, 1823, 1831, 1833, 1835, 1841, 1843, 1845, 1851, 1857, 1859, 1865, 1871, 1873, 1879, 1885, 1887, 1895, 1897, 1899, 1901, 1903, 1905, 1911, 1913, 1915, 1917, 1919, 1925, 1927, 1929, 1935, 1937, 1939, 1955, 1957, 1959, 1961, 1963, 1965, 1971, 1973, 1983, 1985, 1987, 2001, 2003, 2005, 2007, 2017, 2019, 2021, 2023, 2025, 2035, 2037, 2039, 2045, 2047, 2053, 2055, 2057, 2063, 2065, 2067, 2069, 2071, 2073, 2079, 2081, 2083, 2091, 2093, 2095, 2097, 2099, 2109, 2115, 2117, 2119, 2121, 2127, 2129, 2131, 2139, 2141, 2147, 2149, 2155, 2157, 2163, 2165, 2167, 2169, 2175, 2177, 2179, 2185, 2187, 2189, 2195, 2197, 2199, 2205, 2207, 2209, 2217, 2219, 2221, 2227, 2233, 2239, 2245, 2247, 2249, 2255, 2257, 2259, 2265, 2267, 2273, 2275, 2277, 2283, 2285, 2291, 2293, 2299, 2301, 2307, 2309, 2311, 2313, 2315, 2317, 2319, 2322, 2324, 2326, 2328, 2330, 2332, 2334, 2340, 2342, 2344, 2346, 2356, 2367, 2369, 2371, 2373, 2385, 2387, 2389, 2391, 2397, 2399, 2407, 2409, 2411, 2413, 2421, 2423, 2429, 2431, 2437, 2439, 2455, 2457, 2459, 2461, 2471, 2473, 2475, 2477, 2479, 2490, 2492, 2494, 2496, 2498, 2500, 2502, 2504, 2506, 2512, 2514, 2520, 2526, 2528, 2530, 2532, 2538, 2540, 2542, 2548, 2550, 2552, 2558, 2560, 2562, 2564, 2572, 2574, 2576, 2578, 2590, 2592, 2594, 2596, 2598, 2600, 2602, 2604, 2610, 2612, 2614, 2620, 2622, 2624, 2630, 2632, 2640, 2642, 2650, 2652, 2654, 2656, 2662, 2664, 2666, 2668, 2670, 2676, 2678, 2680, 2682, 2688, 2690, 2692, 2694, 2696, 2698, 2700, 2702, 2708, 2714, 2720, 2722, 2730, 2732, 2734, 2742, 2744, 2746, 2748, 2756, 2758, 2760, 2766, 2768, 2770, 2772, 2786, 2794, 2796, 2802, 2810, 2812, 2818, 2824, 2830, 2832, 2834, 2836, 2842, 2844, 2846, 2852, 2854, 2856, 2858, 2860, 2862, 2865, 2867, 2869, 2871, 2873, 2875, 2884, 2886, 2888, 2894, 2896, 2898, 2900, 2908, 2910, 2912, 2914, 2916, 2918, 2924, 2926, 2932, 2934, 2936, 2938, 2944, 2952, 2954, 2956, 2962, 2968, 2970, 2972, 2974, 2976, 2982, 2988, 2990, 2992, 2994, 3000, 3002, 3004, 3012, 3018, 3020, 3022, 3030, 3040, 3042, 3045, 3051, 3053, 3055, 3061, 3063, 3065, 3067, 3069, 3077, 3087, 3089, 3091, 3093, 3099, 3101, 3103, 3105, 3107, 3113, 3115, 3117, 3123, 3125, 3127, 3133, 3135, 3137, 3139, 3141, 3143, 3145, 3151, 3157, 3159, 3161, 3167, 3173, 3175, 3187, 3189, 3191, 3197, 3199, 3201, 3203, 3205, 3213, 3215, 3217, 3219, 3221, 3227, 3229, 3235, 3237, 3239, 3249, 3251, 3257, 3259, 3265, 3267, 3269, 3271, 3273, 3281, 3287, 3289, 3297, 3299, 3305, 3307, 3309, 3315, 3321, 3323, 3325, 3327, 3329, 3335, 3341, 3343, 3352, 3354, 3366, 3368, 3374, 3376, 3382, 3384, 3386, 3388, 3390, 3396, 3398, 3406, 3408, 3416, 3418, 3420, 3422, 3424, 3430, 3432, 3438, 3446, 3448, 3450, 3452, 3454, 3456, 3462, 3464, 3470, 3472, 3474, 3482, 3488, 3490, 3492, 3494, 3502, and 3504.

[0312] Certain aspects of the present invention are described in greater detail in the non-limiting examples that follow.

### EXAMPLES

[0313] The following examples are put forth so as to provide those of ordinary skill in the art with a complete disclosure and description of how to make and use the present invention, and are not intended to limit the scope of what the inventors regard as their invention nor are they intended to represent that the experiments below are all and only experiments performed. Efforts have been made to ensure accuracy with respect to numbers used (e.g. amounts, temperature, etc.) but some experimental errors and deviations should be accounted for. Unless indicated otherwise, parts are parts by weight, molecular weight is weight average molecular weight, temperature is in degrees Celsius, and pressure is at or near atmospheric.

### Example 1

### Insertion Site Analysis Following Tumor Induction in Mice

[0314] Tumors are induced in mice using either mouse mammary tumor virus (MMTV) or murine leukemia virus (MLV). MMTV causes mammary adenocarcinomas and MLV causes a variety of different hematopoetic malignancies (primarily T- or B-cell lymphomas). Three routes of infection are used: (1) injection of neonates with purified virus preparations, (2) infection by milk-borne virus during nursing, and (3) genetic transmission of pathogenic proviruses via the germ-line (Akvr1 and/or Mtv2). The type of malignancy present in each affected mouse is determined by histological analysis of H&E-stained thin sections of formalin-fixed, paraffin-embedded biopsy samples. Host DNA sequences flanking all clonally-integrated proviruses in each tumor are recovered by nested anchored-PCR using two virus-specific primers and two primers specific for a 40 bp double stranded DNA anchor ligated to restriction enzyme digested tumor DNA. Amplified bands representing host/virus junction fragments are cloned and sequenced. Then the host sequences (called “tags”) are used to BLAST analyze the Celera mouse genomic sequence. For each individual tag, three parameters are recorded: (1) the mouse chromosome assignment, (2) base pair coordinates at which the integration occurred, and (3) provirus orientation. Using this information, all available tags from all analyzed tumors are mapped to the mouse genome. To identify the proto-oncogene targets of provirus insertion mutation, the provirus integration pattern at each cluster of integrants is analyzed relative to the locations of all known genes in the transcriptome. The presence of provirus at the same locus in two or more independent tumors is prima facie evidence that a proto-oncogene is present at or very near the proviral integration sites. This is because the genome is too large for random integrations to result in observable clustering. Any clustering that is detected is unequivocal evidence for biological selection during tumorigenesis. In order to identify the human orthologs of the proto-oncogene targets of provirus insertion mutation, a comparative analysis of syntenic regions of the mouse and human genomes is performed.

[0315] An example of PCR amplification of host/virus junction fragments is presented in FIG. 1. Lane 1 contains the amplification products from normal control DNA and lane 2 contains the amplification products from tumor DNA. The bands result from 5′ host/virus junction fragments present in the DNA samples. Lane 1 has bands from the env/3′ LTR junctions from all proviruses (upper) and the host/5′ LTR from the pathogenic endogenous Mtv2 provirus present in this particular mouse strain. This endogenous provirus is detected because its sequence is identical to the new clonally integrated proviruses in the tumor. All four new clonally integrated proviruses known to be in this tumor are readily detected.

### Example 2

### Analysis of Quantitative RT-PCR

### Comparative C_{T} Method

[0316] The expression level of target genes is quantified using the ABI PRISM 7900HT Sequence Detection System (Applied Biosystems, California). The method is based on the quantitation of the initial copy number of target template in comparison to that of a reference (normalizer) housekeeper gene (Pre-Developed TaqMan® Assay Reagents Gene Expression Quantification Protocol, Applied Biosystems, 2001). Accumulation of DNA product with each PCR cycle is related to amplicon efficiency and the initial template concentration. Therefore the amplification efficiency of both the target and the normalizer must be approximately equal. The threshold cycle (C_{T}), which is dependent on the starting template copy number and the DNA amplification efficiency, is a PCR cycle during which PCR product growth is exponential. With a similar dynamic range for the target and normalizer, the comparative C_{T} method is applicable.

[0317] An example of the comparative C_{T} method of gene expression for quantitative RT-PCR is shown in FIG. 2. In the first step, assays are performed in quadruplicate on a normal tissue and several sample tissues. In these tissues, the means and standard deviations of C_{T} values are determined for housekeeper genes (chosen as controls if shown to be biologically stable among various samples, irrespective of disease state) and for the target gene. FIG. 2 shows an example of average C_{T} values for a housekeeper gene and target gene. These values can fall within a range from upper teens to 40 depending on the intrinsic expression level of the gene in the particular tissue. The coefficient of variance of all replicate sets cannot exceed 1.5%.

[0318] An assessment of how the ΔC_{T} changes with template dilution verifies that the efficiencies of the target and housekeeper amplicons are approximately equal if the log input amount of template RNA versus ΔC_{T} plot has a slope<0.10. With the relative efficiencies verified for target and housekeeper, the ΔΔC_{T} comparative calculation becomes valid, as mentioned above. An example of the calculated difference between the C_{T} values of target and housekeeper genes (ΔC_{T}) for various samples is shown in FIG. 3. The ΔΔC_{T} is calculated for each sample by subtracting its ΔC_{T} value from the ΔC_{T} value of the baseline (calibrator) sample. If the expression is increased in some samples and decreased in others, ΔΔC_{T} will be a mixture of negative and positive values. The final step in the calculation is to transform these values to absolute values. The formula for this is:
Comparative expression level=2^{-ΔΔCT}

[0319] The final value for the calibrator should always be one. FIG. 4 shows the ΔΔC_{T} and comparative expression level for each sample from FIG. 3.

### Example 3

### Detection of Elevated Levels of cDNA Associated with Cancer Using Arrays

[0320] cDNA sequences representing a variety of candidate CA genes to be screened for differential expression in cancer are assayed by hybridization on polynucleotide arrays. The cDNA sequences include cDNA clones isolated from cell lines or tissues of interest. The cDNA sequences analyzed also include polynucleotides comprising sequence overlap with sequences in the Unigene database, and which encode a variety of gene products of various origins, functionality, and levels of characterization. cDNAs are spotted onto reflective slides (Amersham) according to methods well known in the art at a density of 9,216 spots per slide representing 4,068 sequences (including controls) spotted in duplicate, with approximately 0.8 μl of an approximately 200 ng/μl solution of cDNA.

[0321] PCR products of selected cDNA clones corresponding to the gene products of interest are prepared in a 50% DMSO solution. These PCR products are spotted onto Amersham aluminum microarray slides at a density of 9216 clones per array using a Molecular Dynamics Generation III spotting robot. Clones are spotted in duplicate, for a total of 4608 different sequences per chip.

[0322] cDNA probes are prepared from total RNA obtained by laser capture microdissection (LCM, Arcturus Engineering Inc., Mountain View, Calif.) of tumor tissue samples and normal tissue samples isolated from patients.

[0323] Total RNA is first reverse transcribed into cDNA using a primer containing a T7 RNA polymerase promoter, followed by second strand DNA synthesis. cDNA is then transcribed in vitro to produce antisense RNA using the T7 promoter-mediated expression (see, e.g., Luo et al. (1999) Nature Med 5:117-122), and the antisense RNA is then converted into cDNA. The second set of cDNAs are again transcribed in vitro, using the T7 promoter, to provide antisense RNA. This antisense RNA is then fluorescently labeled, or the RNA is again converted into cDNA, allowing for a third round of T7-mediated amplification to produce more antisense RNA. Thus the procedure provides for two or three rounds of in vitro transcription to produce the final RNA used for fluorescent labeling. Probes are labeled by making fluorescently labeled cDNA from the RNA starting material. Fluorescently labeled cDNAs prepared from the tumor RNA sample are compared to fluorescently labeled cDNAs prepared from normal cell RNA sample. For example, the cDNA probes from the normal cells are labeled with Cy3 fluorescent dye (green) and the cDNA probes prepared from suspected cancer cells are labeled with Cy5 fluorescent dye (red).

[0324] The differential expression assay is performed by mixing equal amounts of probes from tumor cells and normal cells of the same patient. The arrays are prehybridized by incubation for about 2 hrs at 60° C. in 5×SSC, 0.2% SDS, 1 mM EDTA, and then washing three times in water and twice in isopropanol. Following prehybridization of the array, the probe mixture is then hybridized to the array under conditions of high stringency (overnight at 42° C. in 50% formamide, 5×SSC, and 0.2% SDS. After hybridization, the array is washed at 55° C. three times as follows: 1) first wash in 1×SSC/0.2% SDS; 2) second wash in 0.1×SSC/0.2% SDS; and 3) third wash in 0.1×SSC.

[0325] The arrays are then scanned for green and red fluorescence using a Molecular Dynamics Generation III dual color laser-scanner/detector. The images are processed using BioDiscovery Autogene software, and the data from each scan set normalized. The experiment is repeated, this time labeling the two probes with the opposite color in order to perform the assay in both “color directions.” Each experiment is sometimes repeated with two more slides (one in each color direction). The data from each scan is normalized, and the level of fluorescence for each sequence on the array expressed as a ratio of the geometric mean of 8 replicate spots/genes from the four arrays or 4 replicate spots/gene from 2 arrays or some other permutation.

[0326] Normalization: The objective of normalization is to generate a cDNA library in which all transcripts expressed in a particular cell type or tissue are equally represented (S. M. Weissman, Mol. Biol. Med. 4(3):133-143 (1987); Patanjali, et al., Proc. Natl. Acad. Sci. USA 88(5):1943-1947 (1991)), and therefore isolation of as few as 30,000 recombinant clones in an optimally normalized library may represent the entire gene expression repertoire of a cell, estimated to number 10,000 per cell.

[0327] Total RNA is extracted from harvested cells using RNeasy™ Protect Kit (Qiagen, Valencia, Calif.), following manufacturer's recommended procedures. RNA is quantified using RiboGreen™ RNA quantification kit (Molecular Probes, Inc. Eugene, Oreg.). One μg of total RNA is reverse transcribed and PCR amplified using SMART™ PCR cDNA synthesis kit (ClonTech, Palo Alto, Calif.). The cDNA products are size-selected by agarose gel electrophoresis using standard procedures (Sambrook, J. T., et al. Molecular Cloning: A Laboratory Manual, 2d ed., Cold Spring Harbor Laboratory Press, NY). The cDNA is extracted using Bio 101 Geneclean® II kit (Qbiogene, Carlsbad, Calif.). Normalization of the cDNA is carried out using kinetics of hybridization principles: 1.0 μg of cDNA is denatured by heat at 100° C. for 10 minutes, then incubated at 42° C. for 42 hours in the presence of 120 mM NaCl, 10 mM Tris·HCl (pH=8.0), 5 mM EDTA·Na+ and 50% formamide. Single-stranded cDNA (“normalized”) is purified by hydroxyapatite chromatography (#130-0520, BioRad, Hercules, Calif.) following the manufacturer's recommended procedures, amplified and converted to double-stranded cDNA by three cycles of PCR amplification, and cloned into plasmid vectors using standard procedures (Sambrook, J. T., et al. Molecular Cloning: A Laboratory Manual, 2d ed., Cold Spring Harbor Laboratory Press, NY). All primers/adaptors used in the normalization and cloning process are provided by the manufacturer in the SMART™ PCR cDNA synthesis kit (ClonTech, Palo Alto, Calif.). Supercompetent cells (XL-2 Blue Ultracompetent Cells, Stratagene, California) are transfected with the normalized cDNA libraries, plated on solid media and grown overnight at 36° C.

[0328] The sequences of 10,000 recombinants per normalized library are analyzed by capillary sequencing using the ABI PRISM 3700 DNA Analyzer (Applied Biosystems, California). To determine the representation of transcripts in a library, BLAST analysis is performed on the clone sequences to assign transcript identity to each isolated clone, i.e., the sequences of the isolated polynucleotides are first masked to eliminate low complexity sequences using the XBLAST masking program (Claverie “Effective Large-Scale Sequence Similarity Searches,” Computer Methods for Macromolecular Sequence Analysis, Doolittle, ed., Meth. Enzymol. 266:212-227 Academic Press, NY, N.Y. (1996); see particularly Claverie, in “Automated DNA Sequencing and Analysis Techniques” Adams et al., eds., Chap. 36, p. 267 Academic Press, San Diego, 1994 and Claverie et al. Comput. Chem. (1993) 17:191). Generally, masking does not influence the final search results, except to eliminate sequences of relative little interest due to their low complexity, and to eliminate multiple “hits” based on similarity to repetitive regions common to multiple sequences, e.g., Alu repeats. The remaining sequences are then used in a BLASTN vs. GenBank search. The sequences are also used as query sequence in a BLASTX vs. NRP (non-redundant proteins) database search.

[0329] Automated sequencing reactions are performed using a Perkin-Elmer PRISM Dye Terminator Cycle Sequencing Ready Reaction Kit containing AmpliTaq DNA Polymerase, FS, according to the manufacturer's directions. The reactions are cycled on a GeneAmp PCR System 9600 as per manufacturer's instructions, except that they are annealed at 20° C. or 30° C. for one minute. Sequencing reactions are ethanol precipitated, pellets are resuspended in 8 microliters of loading buffer, 1.5 microliters is loaded on a sequencing gel, and the data is collected by an ABI PRISM 3700 DNA Sequencer. (Applied Biosystems, Foster City, Calif.).

[0330] The number of times a sequence is represented in a library is determined by performing sequence identity analysis on the cloned cDNA sequences and assigning transcript identity to each isolated clone. First, each sequence is checked to determine if it is a bacterial, ribosomal, or mitochondrial contaminant. Such sequences are excluded from the subsequent analysis. Second, sequence artifacts, such as vector and repetitive elements, are masked and/or removed from each sequence.

[0331] The remaining sequences are compared via BLAST (Altschul et. al, J. Mol. Biol., 215:40, 1990) to GenBank and EST databases for gene identification and are compared with each other via FastA (Pearson & Lipman, PNAS, 85:2444, 1988) to calculate the frequency of cDNA appearance in the normalized cDNA library. The sequences are also searched against the GenBank and GeneSeq nucleotide databases using the BLASTN program (BLASTN 1.3 MP: Altschul et al., J. Mol. Bio. 215:403, 1990). Fourth, the sequences are analyzed against a non-redundant protein (NRP) database with the BLASTX program (BLASTX 1.3 MP: Altschul et al., supra). This protein database is a combination of the Swiss-Prot, PIR, and NCBI GenPept protein databases. The BLASTX program is run using the default BLOSUM-62 substitution matrix with the filter parameter: “xnu+seg”. The score cutoff utilized is 75. Assembly of overlapping clones into contigs is done using the program Sequencher (Gene Codes Corp.; Ann Arbor, Mich.). The assembled contigs are analyzed using the programs in the GCG package (Genetic Computer Group, University Research Park, 575 Science Drive, Madison, Wis. 53711) Suite Version 10.1.

### Example 4

### Detection of CA-Sequences in Human Cancer Cells and Tissues

[0332] DNA from prostate and breast cancer tissues and other human cancer tissues, human colon, normal human tissues including non-cancerous prostate, and from other human cell lines are extracted following the procedure of Delli Bovi et al. (1986, Cancer Res. 46:6333-6338). The DNA is resuspended in a solution containing 0.05 M Tris HCl buffer, pH 7.8, and 0.1 mM EDTA, and the amount of DNA recovered is determined by microfluorometry using Hoechst 33258 dye. Cesarone, C. et al., Anal Biochem 100:188-197 (1979).

[0333] Polymerase chain reaction (PCR) is performed using Taq polymerase following the conditions recommended by the manufacturer (Perkin Elmer Cetus) with regard to buffer, Mg²⁺, and nucleotide concentrations. Thermocycling is performed in a DNA cycler by denaturation at 94° C. for 3 min. followed by either 35 or 50 cycles of 94° C. for 1.5 min., 50° C. for 2 min. and 72° C. for 3 min. The ability of the PCR to amplify the selected regions of the CA gene is tested by using a cloned CA polynucleotide(s) as a positive template(s). Optimal Mg²⁺, primer concentrations and requirements for the different cycling temperatures are determined with these templates. The master mix recommended by the manufacturer is used. To detect possible contamination of the master mix components, reactions without template are routinely tested.

[0334] Southern blotting and hybridization are performed as described by Southern, E. M., (J. Mol. Biol. 98:503-517, 1975), using the cloned sequences labeled by the random primer procedure (Feinberg, A. P., et al., 1983, Anal. Biochem. 132:6-13). Prehybridization and hybridization are performed in a solution containing 6×SSPE, 5% Denhardt's, 0.5% SDS, 50% formamide, 100 μg/ml denaturated salmon testis DNA, incubated for 18 hrs at 42° C., followed by washings with 2×SSC and 0.5% SDS at room temperature and at 37° C. and finally in 0.1×SSC with 0.5% SDS at 68° C. for 30 min (Sambrook et al., 1989, in “Molecular Cloning: A Laboratory Manual”, Cold Spring Harbor Lab. Press). For paraffin-embedded tissue sections the conditions described by Wright and Manos (1990, in “PCR Protocols”, Innis et al., eds., Academic Press, pp. 153-158) are followed using primers designed to detect a 250 bp sequence.

### Example 5

### Expression of Cloned Polynucleotides in Host Cells

[0335] To study the protein products of CA genes, restriction fragments from CA DNA are cloned into the expression vector pMT2 (Sambrook, et al., Molecular Cloning: A Laboratory Manual, Cold Spring Harbor Laboratory Press pp 16.17-16.22 (1989)) and transfected into COS cells grown in DMEM supplemented with 10% FCS. Transfections are performed employing calcium phosphate techniques (Sambrook, et al (1989) pp. 16.32-16.40, supra) and cell lysates are prepared forty-eight hours after transfection from both transfected and untransfected COS cells. Lysates are subjected to analysis by immunoblotting using anti-peptide antibody.

[0336] In immunoblotting experiments, preparation of cell lysates and electrophoresis are performed according to standard procedures. Protein concentration is determined using BioRad protein assay solutions. After semi-dry electrophoretic transfer to nitrocellulose, the membranes are blocked in 500 mM NaCl, 20 mM Tris, pH 7.5, 0.05% Tween-20 (TTBS) with 5% dry milk. After washing in TTBS and incubation with secondary antibodies (Amersham), enhanced chemiluminescence (ECL) protocols (Amersham) are performed as described by the manufacturer to facilitate detection.

### Example 6

### Generation of Antibodies Against Polypeptides

[0337] Polypeptides, unique to CA genes are synthesized or isolated from bacterial or other (e.g., yeast, baculovirus) expression systems and conjugated to rabbit serum albumin (RSA) with m-maleimido benzoic acid N-hydroxysuccinimide ester (MBS) (Pierce, Rockford, Ill.). Immunization protocols with these peptides are performed according to standard methods. Initially, a pre-bleed of the rabbits is performed prior to immunization. The first immunization includes Freund's complete adjuvant and 500 μg conjugated peptide or 100 μg purified peptide. All subsequent immunizations, performed four weeks after the previous injection, include Freund's incomplete adjuvant with the same amount of protein. Bleeds are conducted seven to ten days after the immunizations.

[0338] For affinity purification of the antibodies, the corresponding CA polypeptide is conjugated to RSA with MBS, and coupled to CNBr-activated Sepharose (Pharmacia, Uppsala, Sweden). Antiserum is diluted 10-fold in 10 mM Tris-HCl, pH 7.5, and incubated overnight with the affinity matrix. After washing, bound antibodies are eluted from the resin with 100 mM glycine, pH 2.5.

### Example 7

### Generation of Monoclonal Antibodies Against a CA Polypeptide

[0339] A non-denaturing adjuvant (Ribi, R730, Corixa, Hamilton Mont.) is rehydrated to 4 ml in phosphate buffered saline. 100 μl of this rehydrated adjuvant is then diluted with 400 μl of Hank's Balanced Salt Solution and this is then gently mixed with the cell pellet used for immunization. Approximately 500 μg conjugated peptide or 100 μg purified peptide and Freund's complete are injected into Balb/c mice via foot-pad, once a week. After 6 weeks of weekly injection, a drop of blood is drawn from the tail of each immunized animal to test the titer of antibodies against CA polypeptides using FACS analysis. When the titer reaches at least 1:2000, the mice are sacrificed in a CO₂ chamber followed by cervical dislocation. Lymph nodes are harvested for hybridoma preparation. Lymphocytes from mice with the highest titer are fused with the mouse myeloma line X63-Ag8.653 using 35% polyethylene glycol 4000. On day 10 following the fusion, the hybridoma supernatants are screened for the presence of CAP-specific monoclonal antibodies by fluorescence activated cell sorting (FACS). Conditioned medium from each hybridoma is incubated for 30 minutes with a combined aliquot of PC3, Colo-205, LnCap, or Panc-1 cells. After incubation, the cell samples are washed, resuspended in 0.1 ml diluent and incubated with 1 μg/ml of FITC conjugated F(ab′)2 fragment of goat anti-mouse IgG for 30 min at 4° C. The cells are washed, resuspended in 0.5 ml FACS diluent and analyzed using a FACScan cell analyzer (Becton Dickinson; San Jose, Calif.). Hybridoma clones are selected for further expansion, cloning, and characterization based on their binding to the surface of one or more of cell lines which express the CA polypeptide as assessed by FACS. A hybridoma making a monoclonal antibody designated mAbCA which binds an antigen designated Ag-CA.x and an epitope on that antigen designated Ag-CA.x. 1 is selected.

### Example 8

### ELISA Assay for Detecting CA Related Antigens

[0340] To test blood samples for antibodies that bind specifically to recombinantly produced CA antigens, the following procedure is employed. After a recombinant CA related protein is purified, the recombinant protein is diluted in PBS to a concentration of 5 μg/ml (500 ng/100 μl). 100 microliters of the diluted antigen solution is added to each well of a 96-well Immulon 1 plate (Dynatech Laboratories, Chantilly, Va.), and the plate is then incubated for 1 hour at room temperature, or overnight at 4° C., and washed 3 times with 0.05% Tween 20 in PBS. Blocking to reduce nonspecific binding of antibodies is accomplished by adding to each well 200 μl of a 1% solution of bovine serum albumin in PBS/Tween 20 and incubation for 1 hour. After aspiration of the blocking solution, 100 μl of the primary antibody solution (anticoagulated whole blood, plasma, or serum), diluted in the range of 1/16 to 1/2048 in blocking solution, is added and incubated for 1 hour at room temperature or overnight at 4° C. The wells are then washed 3 times, and 100 μl of goat anti-human IgG antibody conjugated to horseradish peroxidase (Organon Teknika, Durham, N.C.), diluted 1/500 or 1/1000 in PBS/Tween 20, 100 μl of o-phenylenediamine dihydrochloride (OPD, Sigma) solution is added to each well and incubated for 5-15 minutes. The OPD solution is prepared by dissolving a 5 mg OPD tablet in 50 ml 1% methanol in H₂O and adding 50 μl 30% H₂O₂ immediately before use. The reaction is stopped by adding 25 l of 4M H₂SO₄. Absorbances are read at 490 nm in a microplate reader (Bio-Rad).

### Example 9

### Identification and Characterization of CA Antigen on Cancer Cell Surface

[0341] A cell pellet of proximately 25 ul packed cell volume of a cancer cell preparation is lysed by first diluting the cells to 0.5 ml in water followed by freezing and thawing three times. The solution is centrifuged at 14,000 rpm. The resulting pellet, containing the cell membrane fragments, is resuspended in 50 μl of SDS sample buffer (Invitrogen, Carlsbad, Calif.). The sample is heated at 80° C. for 5 minutes and then centrifuged for 2 minutes at 14,000 rpm to remove any insoluble materials.

[0342] The samples are analyzed by Western blot using a 4 to 20% polyacrylamide gradient gel in Tris-Glycine SDS (Invitrogen; Carlsbad Calif.) following the manufacturer's directions. Ten microliters of membrane sample are applied to one lane on the polyacrylamide gel. A separate 10 μL sample is reduced first by the addition of 2 μL of dithiothreitol (100 mM) with heating at 80° C. for 2 minutes and then loaded into another lane. Pre-stained molecular weight markers SeeBlue Plus2 (Invitrogen; Carlsbad, Calif.) are used to assess molecular weight on the gel. The gel proteins are transferred to a nitrocellulose membrane using a transfer buffer of 14.4 g/l glycine, 3 g/l of Tris Base, 10% methanol, and 0.05% SDS. The membranes are blocked, probed with a CAP-specific monoclonal antibody (at a concentration of 0.5 ug/ml), and developed using the Invitrogen WesternBreeze Chromogenic Kit-AntiMouse according to the manufacturer's directions. In the reduced sample of the tumor cell membrane samples, a prominent band is observed migrating at a molecular weight within about 10% of the predicted molecular weight of the corresponding CA protein.

### Example 10

### Preparation of Vaccines

[0343] The present invention also relates to a method of stimulating an immune response against cells that express CA polypeptides in a patient using CA polypeptides of the invention that act as an antigen produced by or associated with a malignant cell. This aspect of the invention provides a method of stimulating an immune response in a human against cancer cells or cells that express CA polynucleotides and polypeptides. The method comprises the step of administering to a human an immunogenic amount of a polypeptide comprising: (a) the amino acid sequence of a human CA protein or (b) a mutein or variant of a polypeptide comprising the amino acid sequence of a human endogenous retrovirus CA protein.

### Example 11

### Generation of Transgenic Animals Expressing Polypeptides as a Means for Testing Therapeutics

[0344] CA nucleic acids are used to generate genetically modified non-human animals, or site specific gene modifications thereof, in cell lines, for the study of function or regulation of prostate tumor-related genes, or to create animal models of diseases, including prostate cancer. The term “transgenic” is intended to encompass genetically modified animals having an exogenous CA gene(s) that is stably transmitted in the host cells where the gene(s) may be altered in sequence to produce a modified protein, or having an exogenous CA LTR promoter operably linked to a reporter gene. Transgenic animals may be made through a nucleic acid construct randomly integrated into the genome. Vectors for stable integration include plasmids, retroviruses and other animal viruses, YACs, and the like. Of interest are transgenic mammals, e.g. cows, pigs, goats, horses, etc., and particularly rodents, e.g. rats, mice, etc.

[0345] The modified cells or animals are useful in the study of CA gene function and regulation. For example, a series of small deletions and/or substitutions may be made in the CA genes to determine the role of different genes in tumorigenesis. Specific constructs of interest include, but are not limited to, antisense constructs to block CA gene expression, expression of dominant negative CA gene mutations, and overexpression of a CA gene. Expression of a CA gene or variants thereof in cells or tissues where it is not normally expressed or at abnormal times of development is provided. In addition, by providing expression of proteins derived from CA in cells in which it is otherwise not normally produced, changes in cellular behavior can be induced.

[0346] DNA constructs for random integration need not include regions of homology to mediate recombination. Conveniently, markers for positive and negative selection are included. For various techniques for transfecting mammalian cells, see Keown et al., Methods in Enzymology 185:527-537 (1990).

[0347] For embryonic stem (ES) cells, an ES cell line is employed, or embryonic cells are obtained freshly from a host, e.g. mouse, rat, guinea pig, etc. Such cells are grown on an appropriate fibroblast-feeder layer or grown in the presence of appropriate growth factors, such as leukemia inhibiting factor (LIF). When ES cells are transformed, they may be used to produce transgenic animals. After transformation, the cells are plated onto a feeder layer in an appropriate medium. Cells containing the construct may be detected by employing a selective medium. After sufficient time for colonies to grow, they are picked and analyzed for the occurrence of integration of the construct. Those colonies that are positive may then be used for embryo manipulation and blastocyst injection. Blastocysts are obtained from 4 to 6 week old superovulated females. The ES cells are trypsinized, and the modified cells are injected into the blastocoel of the blastocyst. After injection, the blastocysts are returned to each uterine horn of pseudopregnant females. Females are then allowed to go to term and the resulting chimeric animals screened for cells bearing the construct. By providing for a different phenotype of the blastocyst and the ES cells, chimeric progeny can be readily detected.

[0348] The chimeric animals are screened for the presence of the modified gene and males and females having the modification are mated to produce homozygous progeny. If the gene alterations cause lethality at some point in development, tissues or organs are maintained as allogeneic or congenic grafts or transplants, or in in vitro culture. The transgenic animals may be any non-human mammal, such as laboratory animals, domestic animals, etc. The transgenic animals are used in functional studies, drug screening, etc., e.g. to determine the effect of a candidate drug on prostate cancer, to test potential therapeutics or treatment regimens, etc.

### Example 12

### Diagnostic Imaging Using CA Specific Antibodies

[0349] The present invention encompasses the use of antibodies to CA polypeptides to accurately stage cancer patients at initial presentation and for early detection of metastatic spread of cancer. Radioimmunoscintigraphy using monoclonal antibodies specific for CA polypeptides can provide an additional cancer-specific diagnostic test. The monoclonal antibodies of the instant invention are used for histopathological diagnosis of carcinomas.

[0350] Subcutaneous human xenografts of cancer cells in nude mice is used to test whether a technetium-99m (^{99m}Tc)-labeled monoclonal antibody of the invention can successfully image the xenografted cancer by external gamma scintography as described for seminoma cells by Marks, et al., Brit. J. Urol. 75:225 (1995). Each monoclonal antibody specific for a CA polypeptide is purified from ascitic fluid of BALB/c mice bearing hybridoma tumors by affinity chromatography on protein A-Sepharose. Purified antibodies, including control monoclonal antibodies such as an avidin-specific monoclonal antibody (Skea, et al., J. Immunol. 151:3557 (1993)) are labeled with ^{99m}Tc following reduction, using the methods of Mather, et al., J. Nucl. Med. 31:692 (1990) and Zhang et al., Nucl. Med. Biol. 19:607 (1992). Nude mice bearing human cancer cells are injected intraperitoneally with 200-500 μCi of ^{99m}Tc-labeled antibody. Twenty-four hours after injection, images of the mice are obtained using a Siemens ZLC3700 gamma camera equipped with a 6 mm pinhole collimator set approximately 8 cm from the animal. To determine monoclonal antibody biodistribution following imaging, the normal organs and tumors are removed, weighed, and the radioactivity of the tissues and a sample of the injectate are measured. Additionally, CA-specific antibodies conjugated to antitumor compounds are used for cancer-specific chemotherapy.

### Example 13

### Immunohistochemical Methods

[0351] Frozen tissue samples from cancer patients are embedded in an optimum cutting temperature (OCT) compound and quick-frozen in isopentane with dry ice. Cryosections are cut with a Leica 3050 CM mictrotome at thickness of 5 μm and thaw-mounted on vectabound-coated slides. The sections are fixed with ethanol at −20° C. and allowed to air dry overnight at room temperature. The fixed sections are stored at −80° C. until use. For immunohistochemistry, the tissue sections are retrieved and first incubated in blocking buffer (PBS, 5% normal goat serum, 0.1% Tween 20) for 30 minutes at room temperature, and then incubated with the CA protein-specific monoclonal antibody and control monoclonal antibodies diluted in blocking buffer (1 μg/ml) for 120 minutes. The sections are then washed three times with the blocking buffer. The bound monoclonal antibodies are detected with a goat anti-mouse IgG+IgM (H+L) F(ab′)²-peroxidase conjugates and the peroxidase substrate diaminobenzidine (1 mg/ml, Sigma Catalog No. D 5637) in 0.1 M sodium acetate buffer pH 5.05 and 0.003% hydrogen peroxide (Sigma cat. No. H1009). The stained slides are counter-stained with hematoxylin and examined under Nikon microscope.

[0352] Monoclonal antibody against a CA protein (antigen) is used to test reactivity with various cell lines from different types of tissues. Cells from different established cell lines are removed from the growth surface without using proteases, packed and embedded in OCT compound. The cells are frozen and sectioned, then stained using a standard IHC protocol. The CellArray™ technology is described in WO 01/43869. Normal tissue (human) obtained by surgical resection are frozen and mounted. Cryosections are cut with a Leica 3050 CM mictrotome at thickness of 5 μm and thaw-mounted on vectabound-coated slides. The sections are fixed with ethanol at −20° C. and allowed to air dry overnight at room temperature. PolyMICA™ Detection kit is used to determine binding of a CA-specific monoclonal antibody to normal tissue. Primary monoclonal antibody is used at a final concentration of 1 μg/ml.

[0353] All publications and patent applications cited in this specification are herein incorporated by reference as if each individual publication or patent application were specifically and individually indicated to be incorporated by reference.

[0354] Although the foregoing invention has been described in some detail by way of illustration and example for purposes of clarity of understanding, it will be readily apparent to those of ordinary skill in the art in light of the teachings of this invention that certain changes and modifications may be made thereto without departing from the spirit or scope of the appended claims.

What is claimed is:

1. An isolated nucleic acid comprising at least 10 contiguous nucleotides of a sequence selected from the group consisting of the polynucleotide sequences of SEQ ID NOS: 13, 21, 23, 25, 31, 33, 35, 37, 39, 41, 43, 49, 51, 53, 59, 61, 63, 77, 79, 81, 87, 89, 95, 97, 99, 113, 115, 117, 127, 129, 131, 133, 135, 137, 139, 141, 147, 149, 155, 161, 163, 165, 167, 169, 171, 173, 175, 181, 183, 185, 187, 189, 191, 193, 195, 197, 199, 201, 207, 209, 211, 217, 219, 225, 227, 229, 231, 237, 239, 245, 253, 255, 261, 263, 265, 267, 273, 275, 277, 279, 285, 287, 289, 301, 307, 309, 311, 317, 319, 321, 327, 333, 335, 344, 346, 348, 350, 352, 354, 364, 366, 376, 378, 380, 382, 384, 386, 388, 390, 396, 408, 410, 416, 418, 426, 432, 434, 436, 438, 440, 442, 448, 459, 461, 463, 469, 471, 477, 483, 485, 491, 493, 495, 497, 503, 505, 507, 509, 511, 517, 519, 521, 523, 525, 531, 533, 535, 541, 543, 549, 555, 557, 559, 561, 563, 565, 573, 575, 577, 579, 581, 589, 591, 597, 599, 605, 607, 613, 615, 621, 627, 629, 631, 637, 643, 645, 647, 649, 651, 653, 655, 657, 668, 674, 680, 682, 688, 697, 703, 709, 711, 717, 719, 721, 727, 729, 731, 733, 739, 741, 743, 749, 751, 757, 759, 765, 767, 773, 775, 783, 785, 787, 793, 795, 797, 803, 805, 807, 809, 811, 821, 823, 825, 831, 833, 835, 837, 839, 841, 843, 849, 851, 853, 867, 869, 875, 877, 879, 881, 883, 895, 901, 903, 909, 911, 913, 919, 921, 927, 929, 931, 937, 943, 945, 951, 953, 955, 961, 963, 969, 971, 973, 975, 981, 983, 985, 987, 999, 1001, 1003, 1005, 1007, 1013, 1015, 1017, 1019, 1021, 1027, 1029, 1035, 1037, 1039, 1041, 1043, 1049, 1058, 1060, 1062, 1064, 1066, 1068, 1070, 1072, 1078, 1080, 1082, 1088, 1090, 1096, 1102, 1108, 1110, 1112, 1114, 1116, 1122, 1128, 1134, 1136, 1142, 1144, 1150, 1156, 1158, 1160, 1166, 1168, 1174, 1176, 1178, 1184, 1186, 1192, 1194, 1196, 1208, 1210, 1212, 1218, 1220, 1226, 1228, 1230, 1232, 1238, 1244, 1246, 1248, 1254, 1256, 1258, 1260, 1262, 1264, 1266, 1272, 1274, 1276, 1278, 1280, 1282, 1288, 1290, 1292, 1294, 1296, 1302, 1304, 1310, 1312, 1314, 1316, 1328, 1334, 1336, 1338, 1340, 1348, 1350, 1356, 1362, 1368, 1370, 1372, 1374, 1380, 1382, 1384, 1390, 1392, 1398, 1401, 1403, 1405, 1407, 1409, 1417, 1419, 1421, 1423, 1425, 1427, 1437, 1439, 1441, 1443, 1445, 1447, 1449, 1451, 1457, 1463, 1465, 1467, 1469, 1475, 1483, 1485, 1491, 1500, 1502, 1508, 1510, 1516, 1518, 1520, 1522, 1524, 1534, 1540, 1542, 1550, 1552, 1554, 1560, 1562, 1564, 1566, 1572, 1574, 1580, 1582, 1584, 1590, 1592, 1604, 1606, 1608, 1610, 1612, 1614, 1620, 1626, 1628, 1634, 1636, 1644, 1650, 1658, 1660, 1662, 1664, 1670, 1676, 1678, 1680, 1686, 1692, 1694, 1700, 1702, 1704, 1706, 1712, 1714, 1720, 1722, 1732, 1734, 1736, 1738, 1744, 1746, 1752, 1754, 1765, 1767, 1773, 1775, 1777, 1779, 1781, 1794, 1800, 1802, 1804, 1806, 1812, 1818, 1820, 1822, 1830, 1832, 1834, 1840, 1842, 1844, 1850, 1856, 1858, 1864, 1870, 1872, 1878, 1884, 1886, 1894, 1896, 1898, 1900, 1902, 1904, 1910, 1912, 1914, 1916, 1918, 1924, 1926, 1928, 1934, 1936, 1938, 1954, 1956, 1958, 1960, 1962, 1964, 1970, 1972, 1982, 1984, 1986, 2000, 2002, 2004, 2006, 2016, 2018, 2020, 2022, 2024, 2034, 2036, 2038, 2044, 2046, 2052, 2054, 2056, 2062, 2064, 2066, 2068, 2070, 2072, 2078, 2080, 2082, 2090, 2092, 2094, 2096, 2098, 2108, 2114, 2116, 2118, 2120, 2126, 2128, 2130, 2138, 2140, 2146, 2148, 2154, 2156, 2162, 2164, 2166, 2168, 2174, 2176, 2178, 2184, 2186, 2188, 2194, 2196, 2198, 2204, 2206, 2208, 2216, 2218, 2220, 2226, 2232, 2238, 2244, 2246, 2248, 2254, 2256, 2258, 2264, 2266, 2272, 2274, 2276, 2282, 2284, 2290, 2292, 2298, 2300, 2306, 2308, 2310, 2312, 2314, 2316, 2318, 2321, 2323, 2325, 2327, 2329, 2331, 2333, 2339, 2341, 2343, 2345, 2355, 2366, 2368, 2370, 2372, 2384, 2386, 2388, 2390, 2396, 2398, 2406, 2408, 2410, 2412, 2420, 2422, 2428, 2430, 2436, 2438, 2454, 2456, 2458, 2460, 2470, 2472, 2474, 2476, 2478, 2489, 2491, 2493, 2495, 2497, 2499, 2501, 2503, 2505, 2511, 2513, 2519, 2525, 2527, 2529, 2531, 2537, 2539, 2541, 2547, 2549, 2551, 2557, 2559, 2561, 2563, 2571, 2573, 2575, 2577, 2589, 2591, 2593, 2595, 2597, 2599, 2601, 2603, 2609, 2611, 2613, 2619, 2621, 2623, 2629, 2631, 2639, 2641, 2649, 2651, 2653, 2655, 2661, 2663, 2665, 2667, 2669, 2675, 2677, 2679, 2681, 2687, 2689, 2691, 2693, 2695, 2697, 2699, 2701, 2707, 2713, 2719, 2721, 2729, 2731, 2733, 2741, 2743, 2745, 2747, 2755, 2757, 2759, 2765, 2767, 2769, 2771, 2785, 2793, 2795, 2801, 2809, 2811, 2817, 2823, 2829, 2831, 2833, 2835, 2841, 2843, 2845, 2851, 2853, 2855, 2857, 2859, 2861, 2864, 2866, 2868, 2870, 2872, 2874, 2883, 2885, 2887, 2893, 2895, 2897, 2899, 2907, 2909, 2911, 2913, 2915, 2917, 2923, 2925, 2931, 2933, 2935, 2937, 2943, 2951, 2953, 2955, 2961, 2967, 2969, 2971, 2973, 2975, 2981, 2987, 2989, 2991, 2993, 2999, 3001, 3003, 3011, 3017, 3019, 3021, 3029, 3039, 3041, 3044, 3050, 3052, 3054, 3060, 3062, 3064, 3066, 3068, 3076, 3086, 3088, 3090, 3092, 3098, 3100, 3102, 3104, 3106, 3112, 3114, 3116, 3122, 3124, 3126, 3132, 3134, 3136, 3138, 3140, 3142, 3144, 3150, 3156, 3158, 3160, 3166, 3172, 3174, 3186, 3188, 3190, 3196, 3198, 3200, 3202, 3204, 3212, 3214, 3216, 3218, 3220, 3226, 3228, 3234, 3236, 3238, 3248, 3250, 3256, 3258, 3264, 3266, 3268, 3270, 3272, 3280, 3286, 3288, 3296, 3298, 3304, 3306, 3308, 3314, 3320, 3322, 3324, 3326, 3328, 3334, 3340, 3342, 3351, 3353, 3365, 3367, 3373, 3375, 3381, 3383, 3385, 3387, 3389, 3395, 3397, 3405, 3407, 3415, 3417, 3419, 3421, 3423, 3429, 3431, 3437, 3445, 3447, 3449, 3451, 3453, 3455, 3461, 3463, 3469, 3471, 3473, 3481, 3487, 3489, 3491, 3493, 3501, and 3503 shown in Tables 1-336, or its complement.

2. A host cell comprising a recombinant nucleic acid of claim 1.

3. An expression vector comprising the isolated nucleic acid according to claim 1.

4. A host cell comprising the expression vector of claim 3.

5. The polynucleotide according to claim 1, wherein said polynucleotide, or its complement or a fragment thereof, further comprises a detectable label.

6. The polynucleotide according to claim 1, wherein said polynucleotide, or its complement or a fragment thereof, is attached to a solid support.

7. The polynucleotide according to claim 1, wherein said polynucleotide, or its complement or a fragment thereof, is prepared at least in part by chemical synthesis.

8. The polynucleotide according to claim 1, wherein said polynucleotide, or its complement or a fragment thereof, is an antisense fragment.

9. The polynucleotide according to claim 1, wherein said polynucleotide, or its complement or a fragment thereof, is single stranded.

10. The polynucleotide according to claim 1, wherein said polynucleotide, or its complement or a fragment thereof, is double stranded.

11. The polynucleotide according to claim 1, comprising at least 15 contiguous nucleotides.

12. The polynucleotide according to claim 1, comprising at least 20 contiguous nucleotides.

13. A microarray for detecting a cancer associated (CA) nucleic acid comprising:
at least one probe comprising at least 10 contiguous nucleotides of a sequence selected from the group consisting of the polynucleotide sequences SEQ ID NOS: 13, 21, 23, 25, 31, 33, 35, 37, 39, 41, 43, 49, 51, 53, 59, 61, 63, 77, 79, 81, 87, 89, 95, 97, 99, 113, 115, 117, 127, 129, 131, 133, 135, 137, 139, 141, 147, 149, 155, 161, 163, 165, 167, 169, 171, 173, 175, 181, 183, 185, 187, 189, 191, 193, 195, 197, 199, 201, 207, 209, 211, 217, 219, 225, 227, 229, 231, 237, 239, 245, 253, 255, 261, 263, 265, 267, 273, 275, 277, 279, 285, 287, 289, 301, 307, 309, 311, 317, 319, 321, 327, 333, 335, 344, 346, 348, 350, 352, 354, 364, 366, 376, 378, 380, 382, 384, 386, 388, 390, 396, 408, 410, 416, 418, 426, 432, 434, 436, 438, 440, 442, 448, 459, 461, 463, 469, 471, 477, 483, 485, 491, 493, 495, 497, 503, 505, 507, 509, 511, 517, 519, 521, 523, 525, 531, 533, 535, 541, 543, 549, 555, 557, 559, 561, 563, 565, 573, 575, 577, 579, 581, 589, 591, 597, 599, 605, 607, 613, 615, 621, 627, 629, 631, 637, 643, 645, 647, 649, 651, 653, 655, 657, 668, 674, 680, 682, 688, 697, 703, 709, 711, 717, 719, 721, 727, 729, 731, 733, 739, 741, 743, 749, 751, 757, 759, 765, 767, 773, 775, 783, 785, 787, 793, 795, 797, 803, 805, 807, 809, 811, 821, 823, 825, 831, 833, 835, 837, 839, 841, 843, 849, 851, 853, 867, 869, 875, 877, 879, 881, 883, 895, 901, 903, 909, 911, 913, 919, 921, 927, 929, 931, 937, 943, 945, 951, 953, 955, 961, 963, 969, 971, 973, 975, 981, 983, 985, 987, 999, 1001, 1003, 1005, 1007, 1013, 1015, 1017, 1019, 1021, 1027, 1029, 1035, 1037, 1039, 1041, 1043, 1049, 1058, 1060, 1062, 1064, 1066, 1068, 1070, 1072, 1078, 1080, 1082, 1088, 1090, 1096, 1102, 1108, 1110, 1112, 1114, 1116, 1122, 1128, 1134, 1136, 1142, 1144, 1150, 1156, 1158, 1160, 1166, 1168, 1174, 1176, 1178, 1184, 1186, 1192, 1194, 1196, 1208, 1210, 1212, 1218, 1220, 1226, 1228, 1230, 1232, 1238, 1244, 1246, 1248, 1254, 1256, 1258, 1260, 1262, 1264, 1266, 1272, 1274, 1276, 1278, 1280, 1282, 1288, 1290, 1292, 1294, 1296, 1302, 1304, 1310, 1312, 1314, 1316, 1328, 1334, 1336, 1338, 1340, 1348, 1350, 1356, 1362, 1368, 1370, 1372, 1374, 1380, 1382, 1384, 1390, 1392, 1398, 1401, 1403, 1405, 1407, 1409, 1417, 1419, 1421, 1423, 1425, 1427, 1437, 1439, 1441, 1443, 1445, 1447, 1449, 1451, 1457, 1463, 1465, 1467, 1469, 1475, 1483, 1485, 1491, 1500, 1502, 1508, 1510, 1516, 1518, 1520, 1522, 1524, 1534, 1540, 1542, 1550, 1552, 1554, 1560, 1562, 1564, 1566, 1572, 1574, 1580, 1582, 1584, 1590, 1592, 1604, 1606, 1608, 1610, 1612, 1614, 1620, 1626, 1628, 1634, 1636, 1644, 1650, 1658, 1660, 1662, 1664, 1670, 1676, 1678, 1680, 1686, 1692, 1694, 1700, 1702, 1704, 1706, 1712, 1714, 1720, 1722, 1732, 1734, 1736, 1738, 1744, 1746, 1752, 1754, 1765, 1767, 1773, 1775, 1777, 1779, 1781, 1794, 1800, 1802, 1804, 1806, 1812, 1818, 1820, 1822, 1830, 1832, 1834, 1840, 1842, 1844, 1850, 1856, 1858, 1864, 1870, 1872, 1878, 1884, 1886, 1894, 1896, 1898, 1900, 1902, 1904, 1910, 1912, 1914, 1916, 1918, 1924, 1926, 1928, 1934, 1936, 1938, 1954, 1956, 1958, 1960, 1962, 1964, 1970, 1972, 1982, 1984, 1986, 2000, 2002, 2004, 2006, 2016, 2018, 2020, 2022, 2024, 2034, 2036, 2038, 2044, 2046, 2052, 2054, 2056, 2062, 2064, 2066, 2068, 2070, 2072, 2078, 2080, 2082, 2090, 2092, 2094, 2096, 2098, 2108, 2114, 2116, 2118, 2120, 2126, 2128, 2130, 2138, 2140, 2146, 2148, 2154, 2156, 2162, 2164, 2166, 2168, 2174, 2176, 2178, 2184, 2186, 2188, 2194, 2196, 2198, 2204, 2206, 2208, 2216, 2218, 2220, 2226, 2232, 2238, 2244, 2246, 2248, 2254, 2256, 2258, 2264, 2266, 2272, 2274, 2276, 2282, 2284, 2290, 2292, 2298, 2300, 2306, 2308, 2310, 2312, 2314, 2316, 2318, 2321, 2323, 2325, 2327, 2329, 2331, 2333, 2339, 2341, 2343, 2345, 2355, 2366, 2368, 2370, 2372, 2384, 2386, 2388, 2390, 2396, 2398, 2406, 2408, 2410, 2412, 2420, 2422, 2428, 2430, 2436, 2438, 2454, 2456, 2458, 2460, 2470, 2472, 2474, 2476, 2478, 2489, 2491, 2493, 2495, 2497, 2499, 2501, 2503, 2505, 2511, 2513, 2519, 2525, 2527, 2529, 2531, 2537, 2539, 2541, 2547, 2549, 2551, 2557, 2559, 2561, 2563, 2571, 2573, 2575, 2577, 2589, 2591, 2593, 2595, 2597, 2599, 2601, 2603, 2609, 2611, 2613, 2619, 2621, 2623, 2629, 2631, 2639, 2641, 2649, 2651, 2653, 2655, 2661, 2663, 2665, 2667, 2669, 2675, 2677, 2679, 2681, 2687, 2689, 2691, 2693, 2695, 2697, 2699, 2701, 2707, 2713, 2719, 2721, 2729, 2731, 2733, 2741, 2743, 2745, 2747, 2755, 2757, 2759, 2765, 2767, 2769, 2771, 2785, 2793, 2795, 2801, 2809, 2811, 2817, 2823, 2829, 2831, 2833, 2835, 2841, 2843, 2845, 2851, 2853, 2855, 2857, 2859, 2861, 2864, 2866, 2868, 2870, 2872, 2874, 2883, 2885, 2887, 2893, 2895, 2897, 2899, 2907, 2909, 2911, 2913, 2915, 2917, 2923, 2925, 2931, 2933, 2935, 2937, 2943, 2951, 2953, 2955, 2961, 2967, 2969, 2971, 2973, 2975, 2981, 2987, 2989, 2991, 2993, 2999, 3001, 3003, 3011, 3017, 3019, 3021, 3029, 3039, 3041, 3044, 3050, 3052, 3054, 3060, 3062, 3064, 3066, 3068, 3076, 3086, 3088, 3090, 3092, 3098, 3100, 3102, 3104, 3106, 3112, 3114, 3116, 3122, 3124, 3126, 3132, 3134, 3136, 3138, 3140, 3142, 3144, 3150, 3156, 3158, 3160, 3166, 3172, 3174, 3186, 3188, 3190, 3196, 3198, 3200, 3202, 3204, 3212, 3214, 3216, 3218, 3220, 3226, 3228, 3234, 3236, 3238, 3248, 3250, 3256, 3258, 3264, 3266, 3268, 3270, 3272, 3280, 3286, 3288, 3296, 3298, 3304, 3306, 3308, 3314, 3320, 3322, 3324, 3326, 3328, 3334, 3340, 3342, 3351, 3353, 3365, 3367, 3373, 3375, 3381, 3383, 3385, 3387, 3389, 3395, 3397, 3405, 3407, 3415, 3417, 3419, 3421, 3423, 3429, 3431, 3437, 3445, 3447, 3449, 3451, 3453, 3455, 3461, 3463, 3469, 3471, 3473, 3481, 3487, 3489, 3491, 3493, 3501, and 3503 shown in Tables 1-336, or its complement.

14. The microarray according to claim 13, comprising at least 15 contiguous nucleotides.

15. The microarray according to claim 13, comprising at least 20 contiguous nucleotides.

16. An isolated polypeptide, encoded within an open reading frame of a CA sequence selected from the group consisting of the polynucleotide sequences of SEQ ID NOS: 12, 20, 30, 48, 58, 76, 86, 94, 112, 126, 146, 154, 160, 180, 206, 216, 224, 236, 244, 252, 260, 272, 284, 300, 306, 316, 326, 332, 343, 363, 375, 395, 407, 415, 425, 431, 447, 458, 468, 476, 482, 490, 502, 516, 530, 540, 548, 554, 572, 588, 596, 604, 612, 620, 626, 636, 642, 667, 673, 679, 687, 696, 702, 708, 716, 726, 738, 748, 756, 764, 772, 782, 792, 802, 820, 830, 848, 866, 874, 894, 900, 908, 918, 926, 936, 942, 950, 960, 968, 980, 998, 1012, 1026, 1034, 1048, 1057, 1077, 1087, 1095, 1101, 1107, 1121, 1127, 1133, 1141, 1149, 1155, 1165, 1173, 1183, 1191, 1207, 1217, 1225, 1237, 1243, 1253, 1271, 1287, 1301, 1309, 1327, 1333, 1347, 1355, 1361, 1367, 1379, 1389, 1397, 1400, 1416, 1436, 1456, 1462, 1474, 1482, 1490, 1499, 1507, 1515, 1533, 1539, 1549, 1559, 1571, 1579, 1589, 1603, 1619, 1625, 1633, 1643, 1649, 1657, 1669, 1675, 1685, 1691, 1699, 1711, 1719, 1731, 1743, 1751, 1764, 1772, 1793, 1799, 1811, 1817, 1829, 1839, 1849, 1855, 1863, 1869, 1877, 1883, 1893, 1909, 1923, 1933, 1953, 1969, 1981, 1999, 2015, 2033, 2043, 2051, 2061, 2077, 2089, 2107, 2113, 2125, 2137, 2145, 2153, 2161, 2173, 2183, 2193, 2203, 2215, 2225, 2231, 2237, 2243, 2253, 2263, 2271, 2281, 2289, 2297, 2305, 2320, 2338, 2354, 2365, 2383, 2395, 2405, 2419, 2427, 2435, 2453, 2469, 2488, 2510, 2518, 2524, 2536, 2546, 2556, 2570, 2588, 2608, 2618, 2628, 2638, 2648, 2660, 2674, 2686, 2706, 2712, 2718, 2728, 2740, 2754, 2764, 2784, 2792, 2800, 2808, 2816, 2822, 2828, 2840, 2850, 2863, 2882, 2892, 2906, 2922, 2930, 2942, 2950, 2960, 2966, 2980, 2986, 2998, 3010, 3016, 3028, 3038, 3043, 3049, 3059, 3075, 3085, 3097, 3111, 3121, 3131, 3149, 3155, 3165, 3171, 3185, 3195, 3211, 3225, 3233, 3247, 3255, 3263, 3279, 3285, 3295, 3303, 3313, 3319, 3333, 3339, 3350, 3364, 3372, 3380, 3394, 3404, 3414, 3428, 3436, 3444, 3460, 3468, 3480, 3486, and 3500 shown in Tables 1-336, or its complement.

17. The polypeptide of claim 16, wherein said polypeptide comprises the amino acid sequence encoded by a polynucleotide selected from the group consisting of SEQ ID NOS: 13, 21, 23, 25, 31, 33, 35, 37, 39, 41, 43, 49, 51, 53, 59, 61, 63, 77, 79, 81, 87, 89, 95, 97, 99, 113, 115, 117, 127, 129, 131, 133, 135, 137, 139, 141, 147, 149, 155, 161, 163, 165, 167, 169, 171, 173, 175, 181, 183, 185, 187, 189, 191, 193, 195, 197, 199, 201, 207, 209, 211, 217, 219, 225, 227, 229, 231, 237, 239, 245, 253, 255, 261, 263, 265, 267, 273, 275, 277, 279, 285, 287, 289, 301, 307, 309, 311, 317, 319, 321, 327, 333, 335, 344, 346, 348, 350, 352, 354, 364, 366, 376, 378, 380, 382, 384, 386, 388, 390, 396, 408, 410, 416, 418, 426, 432, 434, 436, 438, 440, 442, 448, 459, 461, 463, 469, 471, 477, 483, 485, 491, 493, 495, 497, 503, 505, 507, 509, 511, 517, 519, 521, 523, 525, 531, 533, 535, 541, 543, 549, 555, 557, 559, 561, 563, 565, 573, 575, 577, 579, 581, 589, 591, 597, 599, 605, 607, 613, 615, 621, 627, 629, 631, 637, 643, 645, 647, 649, 651, 653, 655, 657, 668, 674, 680, 682, 688, 697, 703, 709, 711, 717, 719, 721, 727, 729, 731, 733, 739, 741, 743, 749, 751, 757, 759, 765, 767, 773, 775, 783, 785, 787, 793, 795, 797, 803, 805, 807, 809, 811, 821, 823, 825, 831, 833, 835, 837, 839, 841, 843, 849, 851, 853, 867, 869, 875, 877, 879, 881, 883, 895, 901, 903, 909, 911, 913, 919, 921, 927, 929, 931, 937, 943, 945, 951, 953, 955, 961, 963, 969, 971, 973, 975, 981, 983, 985, 987, 999, 1001, 1003, 1005, 1007, 1013, 1015, 1017, 1019, 1021, 1027, 1029, 1035, 1037, 1039, 1041, 1043, 1049, 1058, 1060, 1062, 1064, 1066, 1068, 1070, 1072, 1078, 1080, 1082, 1088, 1090, 1096, 1102, 1108, 1110, 1112, 1114, 1116, 1122, 1128, 1134, 1136, 1142, 1144, 1150, 1156, 1158, 1160, 1166, 1168, 1174, 1176, 1178, 1184, 1186, 1192, 1194, 1196, 1208, 1210, 1212, 1218, 1220, 1226, 1228, 1230, 1232, 1238, 1244, 1246, 1248, 1254, 1256, 1258, 1260, 1262, 1264, 1266, 1272, 1274, 1276, 1278, 1280, 1282, 1288, 1290, 1292, 1294, 1296, 1302, 1304, 1310, 1312, 1314, 1316, 1328, 1334, 1336, 1338, 1340, 1348, 1350, 1356, 1362, 1368, 1370, 1372, 1374, 1380, 1382, 1384, 1390, 1392, 1398, 1401, 1403, 1405, 1407, 1409, 1417, 1419, 1421, 1423, 1425, 1427, 1437, 1439, 1441, 1443, 1445, 1447, 1449, 1451, 1457, 1463, 1465, 1467, 1469, 1475, 1483, 1485, 1491, 1500, 1502, 1508, 1510, 1516, 1518, 1520, 1522, 1524, 1534, 1540, 1542, 1550, 1552, 1554, 1560, 1562, 1564, 1566, 1572, 1574, 1580, 1582, 1584, 1590, 1592, 1604, 1606, 1608, 1610, 1612, 1614, 1620, 1626, 1628, 1634, 1636, 1644, 1650, 1658, 1660, 1662, 1664, 1670, 1676, 1678, 1680, 1686, 1692, 1694, 1700, 1702, 1704, 1706, 1712, 1714, 1720, 1722, 1732, 1734, 1736, 1738, 1744, 1746, 1752, 1754, 1765, 1767, 1773, 1775, 1777, 1779, 1781, 1794, 1800, 1802, 1804, 1806, 1812, 1818, 1820, 1822, 1830, 1832, 1834, 1840, 1842, 1844, 1850, 1856, 1858, 1864, 1870, 1872, 1878, 1884, 1886, 1894, 1896, 1898, 1900, 1902, 1904, 1910, 1912, 1914, 1916, 1918, 1924, 1926, 1928, 1934, 1936, 1938, 1954, 1956, 1958, 1960, 1962, 1964, 1970, 1972, 1982, 1984, 1986, 2000, 2002, 2004, 2006, 2016, 2018, 2020, 2022, 2024, 2034, 2036, 2038, 2044, 2046, 2052, 2054, 2056, 2062, 2064, 2066, 2068, 2070, 2072, 2078, 2080, 2082, 2090, 2092, 2094, 2096, 2098, 2108, 2114, 2116, 2118, 2120, 2126, 2128, 2130, 2138, 2140, 2146, 2148, 2154, 2156, 2162, 2164, 2166, 2168, 2174, 2176, 2178, 2184, 2186, 2188, 2194, 2196, 2198, 2204, 2206, 2208, 2216, 2218, 2220, 2226, 2232, 2238, 2244, 2246, 2248, 2254, 2256, 2258, 2264, 2266, 2272, 2274, 2276, 2282, 2284, 2290, 2292, 2298, 2300, 2306, 2308, 2310, 2312, 2314, 2316, 2318, 2321, 2323, 2325, 2327, 2329, 2331, 2333, 2339, 2341, 2343, 2345, 2355, 2366, 2368, 2370, 2372, 2384, 2386, 2388, 2390, 2396, 2398, 2406, 2408, 2410, 2412, 2420, 2422, 2428, 2430, 2436, 2438, 2454, 2456, 2458, 2460, 2470, 2472, 2474, 2476, 2478, 2489, 2491, 2493, 2495, 2497, 2499, 2501, 2503, 2505, 2511, 2513, 2519, 2525, 2527, 2529, 2531, 2537, 2539, 2541, 2547, 2549, 2551, 2557, 2559, 2561, 2563, 2571, 2573, 2575, 2577, 2589, 2591, 2593, 2595, 2597, 2599, 2601, 2603, 2609, 2611, 2613, 2619, 2621, 2623, 2629, 2631, 2639, 2641, 2649, 2651, 2653, 2655, 2661, 2663, 2665, 2667, 2669, 2675, 2677, 2679, 2681, 2687, 2689, 2691, 2693, 2695, 2697, 2699, 2701, 2707, 2713, 2719, 2721, 2729, 2731, 2733, 2741, 2743, 2745, 2747, 2755, 2757, 2759, 2765, 2767, 2769, 2771, 2785, 2793, 2795, 2801, 2809, 2811, 2817, 2823, 2829, 2831, 2833, 2835, 2841, 2843, 2845, 2851, 2853, 2855, 2857, 2859, 2861, 2864, 2866, 2868, 2870, 2872, 2874, 2883, 2885, 2887, 2893, 2895, 2897, 2899, 2907, 2909, 2911, 2913, 2915, 2917, 2923, 2925, 2931, 2933, 2935, 2937, 2943, 2951, 2953, 2955, 2961, 2967, 2969, 2971, 2973, 2975, 2981, 2987, 2989, 2991, 2993, 2999, 3001, 3003, 3011, 3017, 3019, 3021, 3029, 3039, 3041, 3044, 3050, 3052, 3054, 3060, 3062, 3064, 3066, 3068, 3076, 3086, 3088, 3090, 3092, 3098, 3100, 3102, 3104, 3106, 3112, 3114, 3116, 3122, 3124, 3126, 3132, 3134, 3136, 3138, 3140, 3142, 3144, 3150, 3156, 3158, 3160, 3166, 3172, 3174, 3186, 3188, 3190, 3196, 3198, 3200, 3202, 3204, 3212, 3214, 3216, 3218, 3220, 3226, 3228, 3234, 3236, 3238, 3248, 3250, 3256, 3258, 3264, 3266, 3268, 3270, 3272, 3280, 3286, 3288, 3296, 3298, 3304, 3306, 3308, 3314, 3320, 3322, 3324, 3326, 3328, 3334, 3340, 3342, 3351, 3353, 3365, 3367, 3373, 3375, 3381, 3383, 3385, 3387, 3389, 3395, 3397, 3405, 3407, 3415, 3417, 3419, 3421, 3423, 3429, 3431, 3437, 3445, 3447, 3449, 3451, 3453, 3455, 3461, 3463, 3469, 3471, 3473, 3481, 3487, 3489, 3491, 3493, 3501, and 3503 shown in Tables 1-336.

18. The polypeptide of claim 16, wherein said polypeptide comprises the amino acid sequence encoded by a polypeptide selected from the group consisting of SEQ ID NOS: 14, 22, 24, 26, 32, 34, 36, 38, 40, 42, 44, 50, 52, 54, 60, 62, 64, 78, 80, 82, 88, 90, 96, 98, 100, 114, 116, 118, 128, 130, 132, 134, 136, 138, 140, 142, 148, 150, 156, 162, 164, 166, 168, 170, 172, 174, 176, 182, 184, 186, 188, 190, 192, 194, 196, 198, 200, 202, 208, 210, 212, 218, 220, 226, 228, 230, 232, 238, 240, 246, 254, 256, 262, 264, 266, 268, 274, 276, 278, 280, 286, 288, 290, 302, 308, 310, 312, 318, 320, 322, 328, 334, 336, 345, 347, 349, 351, 353, 355, 365, 367, 377, 379, 381, 383, 385, 387, 389, 391, 397, 409, 411, 417, 419, 427, 433, 435, 437, 439, 441, 443, 449, 460, 462, 464, 470, 472, 478, 484, 486, 492, 494, 496, 498, 504, 506, 508, 510, 512, 518, 520, 522, 524, 526, 532, 534, 536, 542, 544, 550, 556, 558, 560, 562, 564, 566, 574, 576, 578, 580, 582, 590, 592, 598, 600, 606, 608, 614, 616, 622, 628, 630, 632, 638, 644, 646, 648, 650, 652, 654, 656, 658, 669, 675, 681, 683, 689, 698, 704, 710, 712, 718, 720, 722, 728, 730, 732, 734, 740, 742, 744, 750, 752, 758, 760, 766, 768, 774, 776, 784, 786, 788, 794, 796, 798, 804, 806, 808, 810, 812, 822, 824, 826, 832, 834, 836, 838, 840, 842, 844, 850, 852, 854, 868, 870, 876, 878, 880, 882, 884, 896, 902, 904, 910, 912, 914, 920, 922, 928, 930, 932, 938, 944, 946, 952, 954, 956, 962, 964, 970, 972, 974, 976, 982, 984, 986, 988, 1000, 1002, 1004, 1006, 1008, 1014, 1016, 1018, 1020, 1022, 1028, 1030, 1036, 1038, 1040, 1042, 1044, 1050, 1059, 1061, 1063, 1065, 1067, 1069, 1071, 1073, 1079, 1081, 1083, 1089, 1091, 1097, 1103, 1109, 1111, 1113, 1115, 1117, 1123, 1129, 1135, 1137, 1143, 1145, 1151, 1157, 1159, 1161, 1167, 1169, 1175, 1177, 1179, 1185, 1187, 1193, 1195, 1197, 1209, 1211, 1213, 1219, 1221, 1227, 1229, 1231, 1233, 1239, 1245, 1247, 1249, 1255, 1257, 1259, 1261, 1263, 1265, 1267, 1273, 1275, 1277, 1279, 1281, 1283, 1289, 1291, 1293, 1295, 1297, 1303, 1305, 1311, 1313, 1315, 1317, 1329, 1335, 1337, 1339, 1341, 1349, 1351, 1357, 1363, 1369, 1371, 1373, 1375, 1381, 1383, 1385, 1391, 1393, 1399, 1402, 1404, 1406, 1408, 1410, 1418, 1420, 1422, 1424, 1426, 1428, 1438, 1440, 1442, 1444, 1446, 1448, 1450, 1452, 1458, 1464, 1466, 1468, 1470, 1476, 1484, 1486, 1492, 1501, 1503, 1509, 1511, 1517, 1519, 1521, 1523, 1525, 1535, 1541, 1543, 1551, 1553, 1555, 1561, 1563, 1565, 1567, 1573, 1575, 1581, 1583, 1585, 1591, 1593, 1605, 1607, 1609, 1611, 1613, 1615, 1621, 1627, 1629, 1635, 1637, 1645, 1651, 1659, 1661, 1663, 1665, 1671, 1677, 1679, 1681, 1687, 1693, 1695, 1701, 1703, 1705, 1707, 1713, 1715, 1721, 1723, 1733, 1735, 1737, 1739, 1745, 1747, 1753, 1755, 1766, 1768, 1774, 1776, 1778, 1780, 1782, 1795, 1801, 1803, 1805, 1807, 1813, 1819, 1821, 1823, 1831, 1833, 1835, 1841, 1843, 1845, 1851, 1857, 1859, 1865, 1871, 1873, 1879, 1885, 1887, 1895, 1897, 1899, 1901, 1903, 1905, 1911, 1913, 1915, 1917, 1919, 1925, 1927, 1929, 1935, 1937, 1939, 1955, 1957, 1959, 1961, 1963, 1965, 1971, 1973, 1983, 1985, 1987, 2001, 2003, 2005, 2007, 2017, 2019, 2021, 2023, 2025, 2035, 2037, 2039, 2045, 2047, 2053, 2055, 2057, 2063, 2065, 2067, 2069, 2071, 2073, 2079, 2081, 2083, 2091, 2093, 2095, 2097, 2099, 2109, 2115, 2117, 2119, 2121, 2127, 2129, 2131, 2139, 2141, 2147, 2149, 2155, 2157, 2163, 2165, 2167, 2169, 2175, 2177, 2179, 2185, 2187, 2189, 2195, 2197, 2199, 2205, 2207, 2209, 2217, 2219, 2221, 2227, 2233, 2239, 2245, 2247, 2249, 2255, 2257, 2259, 2265, 2267, 2273, 2275, 2277, 2283, 2285, 2291, 2293, 2299, 2301, 2307, 2309, 2311, 2313, 2315, 2317, 2319, 2322, 2324, 2326, 2328, 2330, 2332, 2334, 2340, 2342, 2344, 2346, 2356, 2367, 2369, 2371, 2373, 2385, 2387, 2389, 2391, 2397, 2399, 2407, 2409, 2411, 2413, 2421, 2423, 2429, 2431, 2437, 2439, 2455, 2457, 2459, 2461, 2471, 2473, 2475, 2477, 2479, 2490, 2492, 2494, 2496, 2498, 2500, 2502, 2504, 2506, 2512, 2514, 2520, 2526, 2528, 2530, 2532, 2538, 2540, 2542, 2548, 2550, 2552, 2558, 2560, 2562, 2564, 2572, 2574, 2576, 2578, 2590, 2592, 2594, 2596, 2598, 2600, 2602, 2604, 2610, 2612, 2614, 2620, 2622, 2624, 2630, 2632, 2640, 2642, 2650, 2652, 2654, 2656, 2662, 2664, 2666, 2668, 2670, 2676, 2678, 2680, 2682, 2688, 2690, 2692, 2694, 2696, 2698, 2700, 2702, 2708, 2714, 2720, 2722, 2730, 2732, 2734, 2742, 2744, 2746, 2748, 2756, 2758, 2760, 2766, 2768, 2770, 2772, 2786, 2794, 2796, 2802, 2810, 2812, 2818, 2824, 2830, 2832, 2834, 2836, 2842, 2844, 2846, 2852, 2854, 2856, 2858, 2860, 2862, 2865, 2867, 2869, 2871, 2873, 2875, 2884, 2886, 2888, 2894, 2896, 2898, 2900, 2908, 2910, 2912, 2914, 2916, 2918, 2924, 2926, 2932, 2934, 2936, 2938, 2944, 2952, 2954, 2956, 2962, 2968, 2970, 2972, 2974, 2976, 2982, 2988, 2990, 2992, 2994, 3000, 3002, 3004, 3012, 3018, 3020, 3022, 3030, 3040, 3042, 3045, 3051, 3053, 3055, 3061, 3063, 3065, 3067, 3069, 3077, 3087, 3089, 3091, 3093, 3099, 3101, 3103, 3105, 3107, 3113, 3115, 3117, 3123, 3125, 3127, 3133, 3135, 3137, 3139, 3141, 3143, 3145, 3151, 3157, 3159, 3161, 3167, 3173, 3175, 3187, 3189, 3191, 3197, 3199, 3201, 3203, 3205, 3213, 3215, 3217, 3219, 3221, 3227, 3229, 3235, 3237, 3239, 3249, 3251, 3257, 3259, 3265, 3267, 3269, 3271, 3273, 3281, 3287, 3289, 3297, 3299, 3305, 3307, 3309, 3315, 3321, 3323, 3325, 3327, 3329, 3335, 3341, 3343, 3352, 3354, 3366, 3368, 3374, 3376, 3382, 3384, 3386, 3388, 3390, 3396, 3398, 3406, 3408, 3416, 3418, 3420, 3422, 3424, 3430, 3432, 3438, 3446, 3448, 3450, 3452, 3454, 3456, 3462, 3464, 3470, 3472, 3474, 3482, 3488, 3490, 3492, 3494, 3502, and 3504 shown in Tables 1-336.

19. The polypeptide of claim 16, wherein said polypeptide comprises the amino acid sequence of an epitope of the amino acid sequence of a CA polypeptide selected from the group consisting of SEQ ID NOS: 14, 22, 24, 26, 32, 34, 36, 38, 40, 42, 44, 50, 52, 54, 60, 62, 64, 78, 80, 82, 88, 90, 96, 98, 100, 114, 116, 118, 128, 130, 132, 134, 136, 138, 140, 142, 148, 150, 156, 162, 164, 166, 168, 170, 172, 174, 176, 182, 184, 186, 188, 190, 192, 194, 196, 198, 200, 202, 208, 210, 212, 218, 220, 226, 228, 230, 232, 238, 240, 246, 254, 256, 262, 264, 266, 268, 274, 276, 278, 280, 286, 288, 290, 302, 308, 310, 312, 318, 320, 322, 328, 334, 336, 345, 347, 349, 351, 353, 355, 365, 367, 377, 379, 381, 383, 385, 387, 389, 391, 397, 409, 411, 417, 419, 427, 433, 435, 437, 439, 441, 443, 449, 460, 462, 464, 470, 472, 478, 484, 486, 492, 494, 496, 498, 504, 506, 508, 510, 512, 518, 520, 522, 524, 526, 532, 534, 536, 542, 544, 550, 556, 558, 560, 562, 564, 566, 574, 576, 578, 580, 582, 590, 592, 598, 600, 606, 608, 614, 616, 622, 628, 630, 632, 638, 644, 646, 648, 650, 652, 654, 656, 658, 669, 675, 681, 683, 689, 698, 704, 710, 712, 718, 720, 722, 728, 730, 732, 734, 740, 742, 744, 750, 752, 758, 760, 766, 768, 774, 776, 784, 786, 788, 794, 796, 798, 804, 806, 808, 810, 812, 822, 824, 826, 832, 834, 836, 838, 840, 842, 844, 850, 852, 854, 868, 870, 876, 878, 880, 882, 884, 896, 902, 904, 910, 912, 914, 920, 922, 928, 930, 932, 938, 944, 946, 952, 954, 956, 962, 964, 970, 972, 974, 976, 982, 984, 986, 988, 1000, 1002, 1004, 1006, 1008, 1014, 1016, 1018, 1020, 1022, 1028, 1030, 1036, 1038, 1040, 1042, 1044, 1050, 1059, 1061, 1063, 1065, 1067, 1069, 1071, 1073, 1079, 1081, 1083, 1089, 1091, 1097, 1103, 1109, 1111, 1113, 1115, 1117, 1123, 1129, 1135, 1137, 1143, 1145, 1151, 1157, 1159, 1161, 1167, 1169, 1175, 1177, 1179, 1185, 1187, 1193, 1195, 1197, 1209, 1211, 1213, 1219, 1221, 1227, 1229, 1231, 1233, 1239, 1245, 1247, 1249, 1255, 1257, 1259, 1261, 1263, 1265, 1267, 1273, 1275, 1277, 1279, 1281, 1283, 1289, 1291, 1293, 1295, 1297, 1303, 1305, 1311, 1313, 1315, 1317, 1329, 1335, 1337, 1339, 1341, 1349, 1351, 1357, 1363, 1369, 1371, 1373, 1375, 1381, 1383, 1385, 1391, 1393, 1399, 1402, 1404, 1406, 1408, 1410, 1418, 1420, 1422, 1424, 1426, 1428, 1438, 1440, 1442, 1444, 1446, 1448, 1450, 1452, 1458, 1464, 1466, 1468, 1470, 1476, 1484, 1486, 1492, 1501, 1503, 1509, 1511, 1517, 1519, 1521, 1523, 1525, 1535, 1541, 1543, 1551, 1553, 1555, 1561, 1563, 1565, 1567, 1573, 1575, 1581, 1583, 1585, 1591, 1593, 1605, 1607, 1609, 1611, 1613, 1615, 1621, 1627, 1629, 1635, 1637, 1645, 1651, 1659, 1661, 1663, 1665, 1671, 1677, 1679, 1681, 1687, 1693, 1695, 1701, 1703, 1705, 1707, 1713, 1715, 1721, 1723, 1733, 1735, 1737, 1739, 1745, 1747, 1753, 1755, 1766, 1768, 1774, 1776, 1778, 1780, 1782, 1795, 1801, 1803, 1805, 1807, 1813, 1819, 1821, 1823, 1831, 1833, 1835, 1841, 1843, 1845, 1851, 1857, 1859, 1865, 1871, 1873, 1879, 1885, 1887, 1895, 1897, 1899, 1901, 1903, 1905, 1911, 1913, 1915, 1917, 1919, 1925, 1927, 1929, 1935, 1937, 1939, 1955, 1957, 1959, 1961, 1963, 1965, 1971, 1973, 1983, 1985, 1987, 2001, 2003, 2005, 2007, 2017, 2019, 2021, 2023, 2025, 2035, 2037, 2039, 2045, 2047, 2053, 2055, 2057, 2063, 2065, 2067, 2069, 2071, 2073, 2079, 2081, 2083, 2091, 2093, 2095, 2097, 2099, 2109, 2115, 2117, 2119, 2121, 2127, 2129, 2131, 2139, 2141, 2147, 2149, 2155, 2157, 2163, 2165, 2167, 2169, 2175, 2177, 2179, 2185, 2187, 2189, 2195, 2197, 2199, 2205, 2207, 2209, 2217, 2219, 2221, 2227, 2233, 2239, 2245, 2247, 2249, 2255, 2257, 2259, 2265, 2267, 2273, 2275, 2277, 2283, 2285, 2291, 2293, 2299, 2301, 2307, 2309, 2311, 2313, 2315, 2317, 2319, 2322, 2324, 2326, 2328, 2330, 2332, 2334, 2340, 2342, 2344, 2346, 2356, 2367, 2369, 2371, 2373, 2385, 2387, 2389, 2391, 2397, 2399, 2407, 2409, 2411, 2413, 2421, 2423, 2429, 2431, 2437, 2439, 2455, 2457, 2459, 2461, 2471, 2473, 2475, 2477, 2479, 2490, 2492, 2494, 2496, 2498, 2500, 2502, 2504, 2506, 2512, 2514, 2520, 2526, 2528, 2530, 2532, 2538, 2540, 2542, 2548, 2550, 2552, 2558, 2560, 2562, 2564, 2572, 2574, 2576, 2578, 2590, 2592, 2594, 2596, 2598, 2600, 2602, 2604, 2610, 2612, 2614, 2620, 2622, 2624, 2630, 2632, 2640, 2642, 2650, 2652, 2654, 2656, 2662, 2664, 2666, 2668, 2670, 2676, 2678, 2680, 2682, 2688, 2690, 2692, 2694, 2696, 2698, 2700, 2702, 2708, 2714, 2720, 2722, 2730, 2732, 2734, 2742, 2744, 2746, 2748, 2756, 2758, 2760, 2766, 2768, 2770, 2772, 2786, 2794, 2796, 2802, 2810, 2812, 2818, 2824, 2830, 2832, 2834, 2836, 2842, 2844, 2846, 2852, 2854, 2856, 2858, 2860, 2862, 2865, 2867, 2869, 2871, 2873, 2875, 2884, 2886, 2888, 2894, 2896, 2898, 2900, 2908, 2910, 2912, 2914, 2916, 2918, 2924, 2926, 2932, 2934, 2936, 2938, 2944, 2952, 2954, 2956, 2962, 2968, 2970, 2972, 2974, 2976, 2982, 2988, 2990, 2992, 2994, 3000, 3002, 3004, 3012, 3018, 3020, 3022, 3030, 3040, 3042, 3045, 3051, 3053, 3055, 3061, 3063, 3065, 3067, 3069, 3077, 3087, 3089, 3091, 3093, 3099, 3101, 3103, 3105, 3107, 3113, 3115, 3117, 3123, 3125, 3127, 3133, 3135, 3137, 3139, 3141, 3143, 3145, 3151, 3157, 3159, 3161, 3167, 3173, 3175, 3187, 3189, 3191, 3197, 3199, 3201, 3203, 3205, 3213, 3215, 3217, 3219, 3221, 3227, 3229, 3235, 3237, 3239, 3249, 3251, 3257, 3259, 3265, 3267, 3269, 3271, 3273, 3281, 3287, 3289, 3297, 3299, 3305, 3307, 3309, 3315, 3321, 3323, 3325, 3327, 3329, 3335, 3341, 3343, 3352, 3354, 3366, 3368, 3374, 3376, 3382, 3384, 3386, 3388, 3390, 3396, 3398, 3406, 3408, 3416, 3418, 3420, 3422, 3424, 3430, 3432, 3438, 3446, 3448, 3450, 3452, 3454, 3456, 3462, 3464, 3470, 3472, 3474, 3482, 3488, 3490, 3492, 3494, 3502, and 3504 shown in Tables 1-336.

20. The polypeptide of claim 16, wherein said polypeptide or fragment thereof is attached to a solid support.

21. An isolated antibody or antigen binding fragment thereof, that binds to a polypeptide according to any one of claims 16-20.

22. The isolated antibody or antigen binding fragment thereof according the claim 21, wherein said antibody or fragment thereof is attached to a solid support.

23. The isolated antibody or antigen binding fragment thereof according the claim 21, wherein said antibody is a monoclonal antibody.

24. The isolated antibody or antigen binding fragment thereof according the claim 21, wherein said antibody is a polyclonal antibody.

25. The isolated antibody or antigen binding fragment thereof according the claim 21, wherein said antibody or fragment thereof further comprises a detectable label.

26. An isolated antibody that binds to a polypeptide, or antigen binding fragment thereof, according to any of claims 16-20, prepared by a method comprising the steps of: (i) immunizing a host animal with a composition comprising said polypeptide, or antigen binding fragment thereof, and (ii) collecting cells from said host expressing antibodies against the antigen or antigen binding fragment thereof.

27. The monoclonal antibody according to claim 23, wherein the monoclonal antibody is prepared by a process comprising:
(a) providing a hybridoma capable of producing the monoclonal antibody; and
(b) culturing the hybridoma under conditions that provide for the production of the monoclonal antibody by the hybridoma.

28. A hybridoma that produces the monoclonal antibody according to claim 23.

29. The antibody according to claim 21, wherein the antibody is a humanized antibody.

30. A kit for detecting cancer cells comprising the antibody according to claim 21.

31. A kit for detecting cancer cells comprising the monoclonal antibody according to claim 23.

32. A method for detecting a presence or an absence of cancer cells in an individual, the method comprising:
contacting cells from the individual with the antibody according to any of claims 21 or 23;
and detecting a complex of a CAP from the cancer cells and the antibody,
wherein detection of the complex correlates with the presence of cancer cells in the individual.

33. A kit for diagnosing the presence of cancer in a test sample, said kit comprising at least one polynucleotide that selectively hybridizes to a CA polynucleotide sequence selected from the group consisting of the polynucleotide sequences SEQ ID NOS: 12, 20, 30, 48, 58, 76, 86, 94, 112, 126, 146, 154, 160, 180, 206, 216, 224, 236, 244, 252, 260, 272, 284, 300, 306, 316, 326, 332, 343, 363, 375, 395, 407, 415, 425, 431, 447, 458, 468, 476, 482, 490, 502, 516, 530, 540, 548, 554, 572, 588, 596, 604, 612, 620, 626, 636, 642, 667, 673, 679, 687, 696, 702, 708, 716, 726, 738, 748, 756, 764, 772, 782, 792, 802, 820, 830, 848, 866, 874, 894, 900, 908, 918, 926, 936, 942, 950, 960, 968, 980, 998, 1012, 1026, 1034, 1048, 1057, 1077, 1087, 1095, 1101, 1107, 1121, 1127, 1133, 1141, 1149, 1155, 1165, 1173, 1183, 1191, 1207, 1217, 1225, 1237, 1243, 1253, 1271, 1287, 1301, 1309, 1327, 1333, 1347, 1355, 1361, 1367, 1379, 1389, 1397, 1400, 1416, 1436, 1456, 1462, 1474, 1482, 1490, 1499, 1507, 1515, 1533, 1539, 1549, 1559, 1571, 1579, 1589, 1603, 1619, 1625, 1633, 1643, 1649, 1657, 1669, 1675, 1685, 1691, 1699, 1711, 1719, 1731, 1743, 1751, 1764, 1772, 1793, 1799, 1811, 1817, 1829, 1839, 1849, 1855, 1863, 1869, 1877, 1883, 1893, 1909, 1923, 1933, 1953, 1969, 1981, 1999, 2015, 2033, 2043, 2051, 2061, 2077, 2089, 2107, 2113, 2125, 2137, 2145, 2153, 2161, 2173, 2183, 2193, 2203, 2215, 2225, 2231, 2237, 2243, 2253, 2263, 2271, 2281, 2289, 2297, 2305, 2320, 2338, 2354, 2365, 2383, 2395, 2405, 2419, 2427, 2435, 2453, 2469, 2488, 2510, 2518, 2524, 2536, 2546, 2556, 2570, 2588, 2608, 2618, 2628, 2638, 2648, 2660, 2674, 2686, 2706, 2712, 2718, 2728, 2740, 2754, 2764, 2784, 2792, 2800, 2808, 2816, 2822, 2828, 2840, 2850, 2863, 2882, 2892, 2906, 2922, 2930, 2942, 2950, 2960, 2966, 2980, 2986, 2998, 3010, 3016, 3028, 3038, 3043, 3049, 3059, 3075, 3085, 3097, 3111, 3121, 3131, 3149, 3155, 3165, 3171, 3185, 3195, 3211, 3225, 3233, 3247, 3255, 3263, 3279, 3285, 3295, 3303, 3313, 3319, 3333, 3339, 3350, 3364, 3372, 3380, 3394, 3404, 3414, 3428, 3436, 3444, 3460, 3468, 3480, 3486, and 3500 shown in Tables 1-336, or its complement.

34. A kit for diagnosing the presence of cancer in a test sample, said kit comprising at least one polynucleotide that selectively hybridizes to the sequence of a polynucleotide sequence selected from the group consisting of the polynucleotide sequences SEQ ID NOS: 13, 21, 23, 25, 31, 33, 35, 37, 39, 41, 43, 49, 51, 53, 59, 61, 63, 77, 79, 81, 87, 89, 95, 97, 99, 113, 115, 117, 127, 129, 131, 133, 135, 137, 139, 141, 147, 149, 155, 161, 163, 165, 167, 169, 171, 173, 175, 181, 183, 185, 187, 189, 191, 193, 195, 197, 199, 201, 207, 209, 211, 217, 219, 225, 227, 229, 231, 237, 239, 245, 253, 255, 261, 263, 265, 267, 273, 275, 277, 279, 285, 287, 289, 301, 307, 309, 311, 317, 319, 321, 327, 333, 335, 344, 346, 348, 350, 352, 354, 364, 366, 376, 378, 380, 382, 384, 386, 388, 390, 396, 408, 410, 416, 418, 426, 432, 434, 436, 438, 440, 442, 448, 459, 461, 463, 469, 471, 477, 483, 485, 491, 493, 495, 497, 503, 505, 507, 509, 511, 517, 519, 521, 523, 525, 531, 533, 535, 541, 543, 549, 555, 557, 559, 561, 563, 565, 573, 575, 577, 579, 581, 589, 591, 597, 599, 605, 607, 613, 615, 621, 627, 629, 631, 637, 643, 645, 647, 649, 651, 653, 655, 657, 668, 674, 680, 682, 688, 697, 703, 709, 711, 717, 719, 721, 727, 729, 731, 733, 739, 741, 743, 749, 751, 757, 759, 765, 767, 773, 775, 783, 785, 787, 793, 795, 797, 803, 805, 807, 809, 811, 821, 823, 825, 831, 833, 835, 837, 839, 841, 843, 849, 851, 853, 867, 869, 875, 877, 879, 881, 883, 895, 901, 903, 909, 911, 913, 919, 921, 927, 929, 931, 937, 943, 945, 951, 953, 955, 961, 963, 969, 971, 973, 975, 981, 983, 985, 987, 999, 1001, 1003, 1005, 1007, 1013, 1015, 1017, 1019, 1021, 1027, 1029, 1035, 1037, 1039, 1041, 1043, 1049, 1058, 1060, 1062, 1064, 1066, 1068, 1070, 1072, 1078, 1080, 1082, 1088, 1090, 1096, 1102, 1108, 1110, 1112, 1114, 1116, 1122, 1128, 1134, 1136, 1142, 1144, 1150, 1156, 1158, 1160, 1166, 1168, 1174, 1176, 1178, 1184, 1186, 1192, 1194, 1196, 1208, 1210, 1212, 1218, 1220, 1226, 1228, 1230, 1232, 1238, 1244, 1246, 1248, 1254, 1256, 1258, 1260, 1262, 1264, 1266, 1272, 1274, 1276, 1278, 1280, 1282, 1288, 1290, 1292, 1294, 1296, 1302, 1304, 1310, 1312, 1314, 1316, 1328, 1334, 1336, 1338, 1340, 1348, 1350, 1356, 1362, 1368, 1370, 1372, 1374, 1380, 1382, 1384, 1390, 1392, 1398, 1401, 1403, 1405, 1407, 1409, 1417, 1419, 1421, 1423, 1425, 1427, 1437, 1439, 1441, 1443, 1445, 1447, 1449, 1451, 1457, 1463, 1465, 1467, 1469, 1475, 1483, 1485, 1491, 1500, 1502, 1508, 1510, 1516, 1518, 1520, 1522, 1524, 1534, 1540, 1542, 1550, 1552, 1554, 1560, 1562, 1564, 1566, 1572, 1574, 1580, 1582, 1584, 1590, 1592, 1604, 1606, 1608, 1610, 1612, 1614, 1620, 1626, 1628, 1634, 1636, 1644, 1650, 1658, 1660, 1662, 1664, 1670, 1676, 1678, 1680, 1686, 1692, 1694, 1700, 1702, 1704, 1706, 1712, 1714, 1720, 1722, 1732, 1734, 1736, 1738, 1744, 1746, 1752, 1754, 1765, 1767, 1773, 1775, 1777, 1779, 1781, 1794, 1800, 1802, 1804, 1806, 1812, 1818, 1820, 1822, 1830, 1832, 1834, 1840, 1842, 1844, 1850, 1856, 1858, 1864, 1870, 1872, 1878, 1884, 1886, 1894, 1896, 1898, 1900, 1902, 1904, 1910, 1912, 1914, 1916, 1918, 1924, 1926, 1928, 1934, 1936, 1938, 1954, 1956, 1958, 1960, 1962, 1964, 1970, 1972, 1982, 1984, 1986, 2000, 2002, 2004, 2006, 2016, 2018, 2020, 2022, 2024, 2034, 2036, 2038, 2044, 2046, 2052, 2054, 2056, 2062, 2064, 2066, 2068, 2070, 2072, 2078, 2080, 2082, 2090, 2092, 2094, 2096, 2098, 2108, 2114, 2116, 2118, 2120, 2126, 2128, 2130, 2138, 2140, 2146, 2148, 2154, 2156, 2162, 2164, 2166, 2168, 2174, 2176, 2178, 2184, 2186, 2188, 2194, 2196, 2198, 2204, 2206, 2208, 2216, 2218, 2220, 2226, 2232, 2238, 2244, 2246, 2248, 2254, 2256, 2258, 2264, 2266, 2272, 2274, 2276, 2282, 2284, 2290, 2292, 2298, 2300, 2306, 2308, 2310, 2312, 2314, 2316, 2318, 2321, 2323, 2325, 2327, 2329, 2331, 2333, 2339, 2341, 2343, 2345, 2355, 2366, 2368, 2370, 2372, 2384, 2386, 2388, 2390, 2396, 2398, 2406, 2408, 2410, 2412, 2420, 2422, 2428, 2430, 2436, 2438, 2454, 2456, 2458, 2460, 2470, 2472, 2474, 2476, 2478, 2489, 2491, 2493, 2495, 2497, 2499, 2501, 2503, 2505, 2511, 2513, 2519, 2525, 2527, 2529, 2531, 2537, 2539, 2541, 2547, 2549, 2551, 2557, 2559, 2561, 2563, 2571, 2573, 2575, 2577, 2589, 2591, 2593, 2595, 2597, 2599, 2601, 2603, 2609, 2611, 2613, 2619, 2621, 2623, 2629, 2631, 2639, 2641, 2649, 2651, 2653, 2655, 2661, 2663, 2665, 2667, 2669, 2675, 2677, 2679, 2681, 2687, 2689, 2691, 2693, 2695, 2697, 2699, 2701, 2707, 2713, 2719, 2721, 2729, 2731, 2733, 2741, 2743, 2745, 2747, 2755, 2757, 2759, 2765, 2767, 2769, 2771, 2785, 2793, 2795, 2801, 2809, 2811, 2817, 2823, 2829, 2831, 2833, 2835, 2841, 2843, 2845, 2851, 2853, 2855, 2857, 2859, 2861, 2864, 2866, 2868, 2870, 2872, 2874, 2883, 2885, 2887, 2893, 2895, 2897, 2899, 2907, 2909, 2911, 2913, 2915, 2917, 2923, 2925, 2931, 2933, 2935, 2937, 2943, 2951, 2953, 2955, 2961, 2967, 2969, 2971, 2973, 2975, 2981, 2987, 2989, 2991, 2993, 2999, 3001, 3003, 3011, 3017, 3019, 3021, 3029, 3039, 3041, 3044, 3050, 3052, 3054, 3060, 3062, 3064, 3066, 3068, 3076, 3086, 3088, 3090, 3092, 3098, 3100, 3102, 3104, 3106, 3112, 3114, 3116, 3122, 3124, 3126, 3132, 3134, 3136, 3138, 3140, 3142, 3144, 3150, 3156, 3158, 3160, 3166, 3172, 3174, 3186, 3188, 3190, 3196, 3198, 3200, 3202, 3204, 3212, 3214, 3216, 3218, 3220, 3226, 3228, 3234, 3236, 3238, 3248, 3250, 3256, 3258, 3264, 3266, 3268, 3270, 3272, 3280, 3286, 3288, 3296, 3298, 3304, 3306, 3308, 3314, 3320, 3322, 3324, 3326, 3328, 3334, 3340, 3342, 3351, 3353, 3365, 3367, 3373, 3375, 3381, 3383, 3385, 3387, 3389, 3395, 3397, 3405, 3407, 3415, 3417, 3419, 3421, 3423, 3429, 3431, 3437, 3445, 3447, 3449, 3451, 3453, 3455, 3461, 3463, 3469, 3471, 3473, 3481, 3487, 3489, 3491, 3493, 3501, and 3503 shown in Tables 1-336, a fragment thereof, or their complement.

35. An electronic library comprising a polynucleotide, or fragment thereof, comprising a CA polynucleotide sequence selected from the group consisting of the polynucleotide sequences of SEQ ID NOS: 12, 20, 30, 48, 58, 76, 86, 94, 112, 126, 146, 154, 160, 180, 206, 216, 224, 236, 244, 252, 260, 272, 284, 300, 306, 316, 326, 332, 343, 363, 375, 395, 407, 415, 425, 431, 447, 458, 468, 476, 482, 490, 502, 516, 530, 540, 548, 554, 572, 588, 596, 604, 612, 620, 626, 636, 642, 667, 673, 679, 687, 696, 702, 708, 716, 726, 738, 748, 756, 764, 772, 782, 792, 802, 820, 830, 848, 866, 874, 894, 900, 908, 918, 926, 936, 942, 950, 960, 968, 980, 998, 1012, 1026, 1034, 1048, 1057, 1077, 1087, 1095, 1101, 1107, 1121, 1127, 1133, 1141, 1149, 1155, 1165, 1173, 1183, 1191, 1207, 1217, 1225, 1237, 1243, 1253, 1271, 1287, 1301, 1309, 1327, 1333, 1347, 1355, 1361, 1367, 1379, 1389, 1397, 1400, 1416, 1436, 1456, 1462, 1474, 1482, 1490, 1499, 1507, 1515, 1533, 1539, 1549, 1559, 1571, 1579, 1589, 1603, 1619, 1625, 1633, 1643, 1649, 1657, 1669, 1675, 1685, 1691, 1699, 1711, 1719, 1731, 1743, 1751, 1764, 1772, 1793, 1799, 1811, 1817, 1829, 1839, 1849, 1855, 1863, 1869, 1877, 1883, 1893, 1909, 1923, 1933, 1953, 1969, 1981, 1999, 2015, 2033, 2043, 2051, 2061, 2077, 2089, 2107, 2113, 2125, 2137, 2145, 2153, 2161, 2173, 2183, 2193, 2203, 2215, 2225, 2231, 2237, 2243, 2253, 2263, 2271, 2281, 2289, 2297, 2305, 2320, 2338, 2354, 2365, 2383, 2395, 2405, 2419, 2427, 2435, 2453, 2469, 2488, 2510, 2518, 2524, 2536, 2546, 2556, 2570, 2588, 2608, 2618, 2628, 2638, 2648, 2660, 2674, 2686, 2706, 2712, 2718, 2728, 2740, 2754, 2764, 2784, 2792, 2800, 2808, 2816, 2822, 2828, 2840, 2850, 2863, 2882, 2892, 2906, 2922, 2930, 2942, 2950, 2960, 2966, 2980, 2986, 2998, 3010, 3016, 3028, 3038, 3043, 3049, 3059, 3075, 3085, 3097, 3111, 3121, 3131, 3149, 3155, 3165, 3171, 3185, 3195, 3211, 3225, 3233, 3247, 3255, 3263, 3279, 3285, 3295, 3303, 3313, 3319, 3333, 3339, 3350, 3364, 3372, 3380, 3394, 3404, 3414, 3428, 3436, 3444, 3460, 3468, 3480, 3486, and 3500 shown in Tables 1-336, or its complement.

36. An electronic library comprising a polynucleotide, or fragment thereof, comprising a CA polynucleotide sequence selected from the group consisting of the polynucleotide sequences of SEQ ID NOS: 13, 21, 23, 25, 31, 33, 35, 37, 39, 41, 43, 49, 51, 53, 59, 61, 63, 77, 79, 81, 87, 89, 95, 97, 99, 113, 115, 117, 127, 129, 131, 133, 135, 137, 139, 141, 147, 149, 155, 161, 163, 165, 167, 169, 171, 173, 175, 181, 183, 185, 187, 189, 191, 193, 195, 197, 199, 201, 207, 209, 211, 217, 219, 225, 227, 229, 231, 237, 239, 245, 253, 255, 261, 263, 265, 267, 273, 275, 277, 279, 285, 287, 289, 301, 307, 309, 311, 317, 319, 321, 327, 333, 335, 344, 346, 348, 350, 352, 354, 364, 366, 376, 378, 380, 382, 384, 386, 388, 390, 396, 408, 410, 416, 418, 426, 432, 434, 436, 438, 440, 442, 448, 459, 461, 463, 469, 471, 477, 483, 485, 491, 493, 495, 497, 503, 505, 507, 509, 511, 517, 519, 521, 523, 525, 531, 533, 535, 541, 543, 549, 555, 557, 559, 561, 563, 565, 573, 575, 577, 579, 581, 589, 591, 597, 599, 605, 607, 613, 615, 621, 627, 629, 631, 637, 643, 645, 647, 649, 651, 653, 655, 657, 668, 674, 680, 682, 688, 697, 703, 709, 711, 717, 719, 721, 727, 729, 731, 733, 739, 741, 743, 749, 751, 757, 759, 765, 767, 773, 775, 783, 785, 787, 793, 795, 797, 803, 805, 807, 809, 811, 821, 823, 825, 831, 833, 835, 837, 839, 841, 843, 849, 851, 853, 867, 869, 875, 877, 879, 881, 883, 895, 901, 903, 909, 911, 913, 919, 921, 927, 929, 931, 937, 943, 945, 951, 953, 955, 961, 963, 969, 971, 973, 975, 981, 983, 985, 987, 999, 1001, 1003, 1005, 1007, 1013, 1015, 1017, 1019, 1021, 1027, 1029, 1035, 1037, 1039, 1041, 1043, 1049, 1058, 1060, 1062, 1064, 1066, 1068, 1070, 1072, 1078, 1080, 1082, 1088, 1090, 1096, 1102, 1108, 1110, 1112, 1114, 1116, 1122, 1128, 1134, 1136, 1142, 1144, 1150, 1156, 1158, 1160, 1166, 1168, 1174, 1176, 1178, 1184, 1186, 1192, 1194, 1196, 1208, 1210, 1212, 1218, 1220, 1226, 1228, 1230, 1232, 1238, 1244, 1246, 1248, 1254, 1256, 1258, 1260, 1262, 1264, 1266, 1272, 1274, 1276, 1278, 1280, 1282, 1288, 1290, 1292, 1294, 1296, 1302, 1304, 1310, 1312, 1314, 1316, 1328, 1334, 1336, 1338, 1340, 1348, 1350, 1356, 1362, 1368, 1370, 1372, 1374, 1380, 1382, 1384, 1390, 1392, 1398, 1401, 1403, 1405, 1407, 1409, 1417, 1419, 1421, 1423, 1425, 1427, 1437, 1439, 1441, 1443, 1445, 1447, 1449, 1451, 1457, 1463, 1465, 1467, 1469, 1475, 1483, 1485, 1491, 1500, 1502, 1508, 1510, 1516, 1518, 1520, 1522, 1524, 1534, 1540, 1542, 1550, 1552, 1554, 1560, 1562, 1564, 1566, 1572, 1574, 1580, 1582, 1584, 1590, 1592, 1604, 1606, 1608, 1610, 1612, 1614, 1620, 1626, 1628, 1634, 1636, 1644, 1650, 1658, 1660, 1662, 1664, 1670, 1676, 1678, 1680, 1686, 1692, 1694, 1700, 1702, 1704, 1706, 1712, 1714, 1720, 1722, 1732, 1734, 1736, 1738, 1744, 1746, 1752, 1754, 1765, 1767, 1773, 1775, 1777, 1779, 1781, 1794, 1800, 1802, 1804, 1806, 1812, 1818, 1820, 1822, 1830, 1832, 1834, 1840, 1842, 1844, 1850, 1856, 1858, 1864, 1870, 1872, 1878, 1884, 1886, 1894, 1896, 1898, 1900, 1902, 1904, 1910, 1912, 1914, 1916, 1918, 1924, 1926, 1928, 1934, 1936, 1938, 1954, 1956, 1958, 1960, 1962, 1964, 1970, 1972, 1982, 1984, 1986, 2000, 2002, 2004, 2006, 2016, 2018, 2020, 2022, 2024, 2034, 2036, 2038, 2044, 2046, 2052, 2054, 2056, 2062, 2064, 2066, 2068, 2070, 2072, 2078, 2080, 2082, 2090, 2092, 2094, 2096, 2098, 2108, 2114, 2116, 2118, 2120, 2126, 2128, 2130, 2138, 2140, 2146, 2148, 2154, 2156, 2162, 2164, 2166, 2168, 2174, 2176, 2178, 2184, 2186, 2188, 2194, 2196, 2198, 2204, 2206, 2208, 2216, 2218, 2220, 2226, 2232, 2238, 2244, 2246, 2248, 2254, 2256, 2258, 2264, 2266, 2272, 2274, 2276, 2282, 2284, 2290, 2292, 2298, 2300, 2306, 2308, 2310, 2312, 2314, 2316, 2318, 2321, 2323, 2325, 2327, 2329, 2331, 2333, 2339, 2341, 2343, 2345, 2355, 2366, 2368, 2370, 2372, 2384, 2386, 2388, 2390, 2396, 2398, 2406, 2408, 2410, 2412, 2420, 2422, 2428, 2430, 2436, 2438, 2454, 2456, 2458, 2460, 2470, 2472, 2474, 2476, 2478, 2489, 2491, 2493, 2495, 2497, 2499, 2501, 2503, 2505, 2511, 2513, 2519, 2525, 2527, 2529, 2531, 2537, 2539, 2541, 2547, 2549, 2551, 2557, 2559, 2561, 2563, 2571, 2573, 2575, 2577, 2589, 2591, 2593, 2595, 2597, 2599, 2601, 2603, 2609, 2611, 2613, 2619, 2621, 2623, 2629, 2631, 2639, 2641, 2649, 2651, 2653, 2655, 2661, 2663, 2665, 2667, 2669, 2675, 2677, 2679, 2681, 2687, 2689, 2691, 2693, 2695, 2697, 2699, 2701, 2707, 2713, 2719, 2721, 2729, 2731, 2733, 2741, 2743, 2745, 2747, 2755, 2757, 2759, 2765, 2767, 2769, 2771, 2785, 2793, 2795, 2801, 2809, 2811, 2817, 2823, 2829, 2831, 2833, 2835, 2841, 2843, 2845, 2851, 2853, 2855, 2857, 2859, 2861, 2864, 2866, 2868, 2870, 2872, 2874, 2883, 2885, 2887, 2893, 2895, 2897, 2899, 2907, 2909, 2911, 2913, 2915, 2917, 2923, 2925, 2931, 2933, 2935, 2937, 2943, 2951, 2953, 2955, 2961, 2967, 2969, 2971, 2973, 2975, 2981, 2987, 2989, 2991, 2993, 2999, 3001, 3003, 3011, 3017, 3019, 3021, 3029, 3039, 3041, 3044, 3050, 3052, 3054, 3060, 3062, 3064, 3066, 3068, 3076, 3086, 3088, 3090, 3092, 3098, 3100, 3102, 3104, 3106, 3112, 3114, 3116, 3122, 3124, 3126, 3132, 3134, 3136, 3138, 3140, 3142, 3144, 3150, 3156, 3158, 3160, 3166, 3172, 3174, 3186, 3188, 3190, 3196, 3198, 3200, 3202, 3204, 3212, 3214, 3216, 3218, 3220, 3226, 3228, 3234, 3236, 3238, 3248, 3250, 3256, 3258, 3264, 3266, 3268, 3270, 3272, 3280, 3286, 3288, 3296, 3298, 3304, 3306, 3308, 3314, 3320, 3322, 3324, 3326, 3328, 3334, 3340, 3342, 3351, 3353, 3365, 3367, 3373, 3375, 3381, 3383, 3385, 3387, 3389, 3395, 3397, 3405, 3407, 3415, 3417, 3419, 3421, 3423, 3429, 3431, 3437, 3445, 3447, 3449, 3451, 3453, 3455, 3461, 3463, 3469, 3471, 3473, 3481, 3487, 3489, 3491, 3493, 3501, and 3503 shown in Tables 1-336.

37. An electronic library comprising a polypeptide, or fragment thereof, comprising a CA polypeptide sequence selected from the group consisting of the polypeptide sequences of SEQ ID NOS: 14, 22, 24, 26, 32, 34, 36, 38, 40, 42, 44, 50, 52, 54, 60, 62, 64, 78, 80, 82, 88, 90, 96, 98, 100, 114, 116, 118, 128, 130, 132, 134, 136, 138, 140, 142, 148, 150, 156, 162, 164, 166, 168, 170, 172, 174, 176, 182, 184, 186, 188, 190, 192, 194, 196, 198, 200, 202, 208, 210, 212, 218, 220, 226, 228, 230, 232, 238, 240, 246, 254, 256, 262, 264, 266, 268, 274, 276, 278, 280, 286, 288, 290, 302, 308, 310, 312, 318, 320, 322, 328, 334, 336, 345, 347, 349, 351, 353, 355, 365, 367, 377, 379, 381, 383, 385, 387, 389, 391, 397, 409, 411, 417, 419, 427, 433, 435, 437, 439, 441, 443, 449, 460, 462, 464, 470, 472, 478, 484, 486, 492, 494, 496, 498, 504, 506, 508, 510, 512, 518, 520, 522, 524, 526, 532, 534, 536, 542, 544, 550, 556, 558, 560, 562, 564, 566, 574, 576, 578, 580, 582, 590, 592, 598, 600, 606, 608, 614, 616, 622, 628, 630, 632, 638, 644, 646, 648, 650, 652, 654, 656, 658, 669, 675, 681, 683, 689, 698, 704, 710, 712, 718, 720, 722, 728, 730, 732, 734, 740, 742, 744, 750, 752, 758, 760, 766, 768, 774, 776, 784, 786, 788, 794, 796, 798, 804, 806, 808, 810, 812, 822, 824, 826, 832, 834, 836, 838, 840, 842, 844, 850, 852, 854, 868, 870, 876, 878, 880, 882, 884, 896, 902, 904, 910, 912, 914, 920, 922, 928, 930, 932, 938, 944, 946, 952, 954, 956, 962, 964, 970, 972, 974, 976, 982, 984, 986, 988, 1000, 1002, 1004, 1006, 1008, 1014, 1016, 1018, 1020, 1022, 1028, 1030, 1036, 1038, 1040, 1042, 1044, 1050, 1059, 1061, 1063, 1065, 1067, 1069, 1071, 1073, 1079, 1081, 1083, 1089, 1091, 1097, 1103, 1109, 1111, 1113, 1115, 1117, 1123, 1129, 1135, 1137, 1143, 1145, 1151, 1157, 1159, 1161, 1167, 1169, 1175, 1177, 1179, 1185, 1187, 1193, 1195, 1197, 1209, 1211, 1213, 1219, 1221, 1227, 1229, 1231, 1233, 1239, 1245, 1247, 1249, 1255, 1257, 1259, 1261, 1263, 1265, 1267, 1273, 1275, 1277, 1279, 1281, 1283, 1289, 1291, 1293, 1295, 1297, 1303, 1305, 1311, 1313, 1315, 1317, 1329, 1335, 1337, 1339, 1341, 1349, 1351, 1357, 1363, 1369, 1371, 1373, 1375, 1381, 1383, 1385, 1391, 1393, 1399, 1402, 1404, 1406, 1408, 1410, 1418, 1420, 1422, 1424, 1426, 1428, 1438, 1440, 1442, 1444, 1446, 1448, 1450, 1452, 1458, 1464, 1466, 1468, 1470, 1476, 1484, 1486, 1492, 1501, 1503, 1509, 1511, 1517, 1519, 1521, 1523, 1525, 1535, 1541, 1543, 1551, 1553, 1555, 1561, 1563, 1565, 1567, 1573, 1575, 1581, 1583, 1585, 1591, 1593, 1605, 1607, 1609, 1611, 1613, 1615, 1621, 1627, 1629, 1635, 1637, 1645, 1651, 1659, 1661, 1663, 1665, 1671, 1677, 1679, 1681, 1687, 1693, 1695, 1701, 1703, 1705, 1707, 1713, 1715, 1721, 1723, 1733, 1735, 1737, 1739, 1745, 1747, 1753, 1755, 1766, 1768, 1774, 1776, 1778, 1780, 1782, 1795, 1801, 1803, 1805, 1807, 1813, 1819, 1821, 1823, 1831, 1833, 1835, 1841, 1843, 1845, 1851, 1857, 1859, 1865, 1871, 1873, 1879, 1885, 1887, 1895, 1897, 1899, 1901, 1903, 1905, 1911, 1913, 1915, 1917, 1919, 1925, 1927, 1929, 1935, 1937, 1939, 1955, 1957, 1959, 1961, 1963, 1965, 1971, 1973, 1983, 1985, 1987, 2001, 2003, 2005, 2007, 2017, 2019, 2021, 2023, 2025, 2035, 2037, 2039, 2045, 2047, 2053, 2055, 2057, 2063, 2065, 2067, 2069, 2071, 2073, 2079, 2081, 2083, 2091, 2093, 2095, 2097, 2099, 2109, 2115, 2117, 2119, 2121, 2127, 2129, 2131, 2139, 2141, 2147, 2149, 2155, 2157, 2163, 2165, 2167, 2169, 2175, 2177, 2179, 2185, 2187, 2189, 2195, 2197, 2199, 2205, 2207, 2209, 2217, 2219, 2221, 2227, 2233, 2239, 2245, 2247, 2249, 2255, 2257, 2259, 2265, 2267, 2273, 2275, 2277, 2283, 2285, 2291, 2293, 2299, 2301, 2307, 2309, 2311, 2313, 2315, 2317, 2319, 2322, 2324, 2326, 2328, 2330, 2332, 2334, 2340, 2342, 2344, 2346, 2356, 2367, 2369, 2371, 2373, 2385, 2387, 2389, 2391, 2397, 2399, 2407, 2409, 2411, 2413, 2421, 2423, 2429, 2431, 2437, 2439, 2455, 2457, 2459, 2461, 2471, 2473, 2475, 2477, 2479, 2490, 2492, 2494, 2496, 2498, 2500, 2502, 2504, 2506, 2512, 2514, 2520, 2526, 2528, 2530, 2532, 2538, 2540, 2542, 2548, 2550, 2552, 2558, 2560, 2562, 2564, 2572, 2574, 2576, 2578, 2590, 2592, 2594, 2596, 2598, 2600, 2602, 2604, 2610, 2612, 2614, 2620, 2622, 2624, 2630, 2632, 2640, 2642, 2650, 2652, 2654, 2656, 2662, 2664, 2666, 2668, 2670, 2676, 2678, 2680, 2682, 2688, 2690, 2692, 2694, 2696, 2698, 2700, 2702, 2708, 2714, 2720, 2722, 2730, 2732, 2734, 2742, 2744, 2746, 2748, 2756, 2758, 2760, 2766, 2768, 2770, 2772, 2786, 2794, 2796, 2802, 2810, 2812, 2818, 2824, 2830, 2832, 2834, 2836, 2842, 2844, 2846, 2852, 2854, 2856, 2858, 2860, 2862, 2865, 2867, 2869, 2871, 2873, 2875, 2884, 2886, 2888, 2894, 2896, 2898, 2900, 2908, 2910, 2912, 2914, 2916, 2918, 2924, 2926, 2932, 2934, 2936, 2938, 2944, 2952, 2954, 2956, 2962, 2968, 2970, 2972, 2974, 2976, 2982, 2988, 2990, 2992, 2994, 3000, 3002, 3004, 3012, 3018, 3020, 3022, 3030, 3040, 3042, 3045, 3051, 3053, 3055, 3061, 3063, 3065, 3067, 3069, 3077, 3087, 3089, 3091, 3093, 3099, 3101, 3103, 3105, 3107, 3113, 3115, 3117, 3123, 3125, 3127, 3133, 3135, 3137, 3139, 3141, 3143, 3145, 3151, 3157, 3159, 3161, 3167, 3173, 3175, 3187, 3189, 3191, 3197, 3199, 3201, 3203, 3205, 3213, 3215, 3217, 3219, 3221, 3227, 3229, 3235, 3237, 3239, 3249, 3251, 3257, 3259, 3265, 3267, 3269, 3271, 3273, 3281, 3287, 3289, 3297, 3299, 3305, 3307, 3309, 3315, 3321, 3323, 3325, 3327, 3329, 3335, 3341, 3343, 3352, 3354, 3366, 3368, 3374, 3376, 3382, 3384, 3386, 3388, 3390, 3396, 3398, 3406, 3408, 3416, 3418, 3420, 3422, 3424, 3430, 3432, 3438, 3446, 3448, 3450, 3452, 3454, 3456, 3462, 3464, 3470, 3472, 3474, 3482, 3488, 3490, 3492, 3494, 3502, and 3504 shown in Tables 1-336.

38. A method of screening for anticancer activity comprising:
(a) providing a cell that expresses a cancer associated (CA) gene encoded by a nucleic acid sequence selected from the group consisting of the sequences SEQ ID NOS: 12, 20, 30, 48, 58, 76, 86, 94, 112, 126, 146, 154, 160, 180, 206, 216, 224, 236, 244, 252, 260, 272, 284, 300, 306, 316, 326, 332, 343, 363, 375, 395, 407, 415, 425, 431, 447, 458, 468, 476, 482, 490, 502, 516, 530, 540, 548, 554, 572, 588, 596, 604, 612, 620, 626, 636, 642, 667, 673, 679, 687, 696, 702, 708, 716, 726, 738, 748, 756, 764, 772, 782, 792, 802, 820, 830, 848, 866, 874, 894, 900, 908, 918, 926, 936, 942, 950, 960, 968, 980, 998, 1012, 1026, 1034, 1048, 1057, 1077, 1087, 1095, 1101, 1107, 1121, 1127, 1133, 1141, 1149, 1155, 1165, 1173, 1183, 1191, 1207, 1217, 1225, 1237, 1243, 1253, 1271, 1287, 1301, 1309, 1327, 1333, 1347, 1355, 1361, 1367, 1379, 1389, 1397, 1400, 1416, 1436, 1456, 1462, 1474, 1482, 1490, 1499, 1507, 1515, 1533, 1539, 1549, 1559, 1571, 1579, 1589, 1603, 1619, 1625, 1633, 1643, 1649, 1657, 1669, 1675, 1685, 1691, 1699, 1711, 1719, 1731, 1743, 1751, 1764, 1772, 1793, 1799, 1811, 1817, 1829, 1839, 1849, 1855, 1863, 1869, 1877, 1883, 1893, 1909, 1923, 1933, 1953, 1969, 1981, 1999, 2015, 2033, 2043, 2051, 2061, 2077, 2089, 2107, 2113, 2125, 2137, 2145, 2153, 2161, 2173, 2183, 2193, 2203, 2215, 2225, 2231, 2237, 2243, 2253, 2263, 2271, 2281, 2289, 2297, 2305, 2320, 2338, 2354, 2365, 2383, 2395, 2405, 2419, 2427, 2435, 2453, 2469, 2488, 2510, 2518, 2524, 2536, 2546, 2556, 2570, 2588, 2608, 2618, 2628, 2638, 2648, 2660, 2674, 2686, 2706, 2712, 2718, 2728, 2740, 2754, 2764, 2784, 2792, 2800, 2808, 2816, 2822, 2828, 2840, 2850, 2863, 2882, 2892, 2906, 2922, 2930, 2942, 2950, 2960, 2966, 2980, 2986, 2998, 3010, 3016, 3028, 3038, 3043, 3049, 3059, 3075, 3085, 3097, 3111, 3121, 3131, 3149, 3155, 3165, 3171, 3185, 3195, 3211, 3225, 3233, 3247, 3255, 3263, 3279, 3285, 3295, 3303, 3313, 3319, 3333, 3339, 3350, 3364, 3372, 3380, 3394, 3404, 3414, 3428, 3436, 3444, 3460, 3468, 3480, 3486, and 3500 shown in Tables 1-336, or fragment thereof;
(b) contacting a tissue sample derived from a cancer cell with an anticancer drug candidate; and
(c) monitoring an effect of the anticancer drug candidate on an expression of the CA polynucleotide in the tissue sample.

39. The method of screening for anticancer activity according to claim 38, wherein the CA gene comprises at least one nucleic acid sequence selected from the group consisting of the sequences SEQ ID NOS: 13, 21, 23, 25, 31, 33, 35, 37, 39, 41, 43, 49, 51, 53, 59, 61, 63, 77, 79, 81, 87, 89, 95, 97, 99, 113, 115, 117, 127, 129, 131, 133, 135, 137, 139, 141, 147, 149, 155, 161, 163, 165, 167, 169, 171, 173, 175, 181, 183, 185, 187, 189, 191, 193, 195, 197, 199, 201, 207, 209, 211, 217, 219, 225, 227, 229, 231, 237, 239, 245, 253, 255, 261, 263, 265, 267, 273, 275, 277, 279, 285, 287, 289, 301, 307, 309, 311, 317, 319, 321, 327, 333, 335, 344, 346, 348, 350, 352, 354, 364, 366, 376, 378, 380, 382, 384, 386, 388, 390, 396, 408, 410, 416, 418, 426, 432, 434, 436, 438, 440, 442, 448, 459, 461, 463, 469, 471, 477, 483, 485, 491, 493, 495, 497, 503, 505, 507, 509, 511, 517, 519, 521, 523, 525, 531, 533, 535, 541, 543, 549, 555, 557, 559, 561, 563, 565, 573, 575, 577, 579, 581, 589, 591, 597, 599, 605, 607, 613, 615, 621, 627, 629, 631, 637, 643, 645, 647, 649, 651, 653, 655, 657, 668, 674, 680, 682, 688, 697, 703, 709, 711, 717, 719, 721, 727, 729, 731, 733, 739, 741, 743, 749, 751, 757, 759, 765, 767, 773, 775, 783, 785, 787, 793, 795, 797, 803, 805, 807, 809, 811, 821, 823, 825, 831, 833, 835, 837, 839, 841, 843, 849, 851, 853, 867, 869, 875, 877, 879, 881, 883, 895, 901, 903, 909, 911, 913, 919, 921, 927, 929, 931, 937, 943, 945, 951, 953, 955, 961, 963, 969, 971, 973, 975, 981, 983, 985, 987, 999, 1001, 1003, 1005, 1007, 1013, 1015, 1017, 1019, 1021, 1027, 1029, 1035, 1037, 1039, 1041, 1043, 1049, 1058, 1060, 1062, 1064, 1066, 1068, 1070, 1072, 1078, 1080, 1082, 1088, 1090, 1096, 1102, 1108, 1110, 1112, 1114, 1116, 1122, 1128, 1134, 1136, 1142, 1144, 1150, 1156, 1158, 1160, 1166, 1168, 1174, 1176, 1178, 1184, 1186, 1192, 1194, 1196, 1208, 1210, 1212, 1218, 1220, 1226, 1228, 1230, 1232, 1238, 1244, 1246, 1248, 1254, 1256, 1258, 1260, 1262, 1264, 1266, 1272, 1274, 1276, 1278, 1280, 1282, 1288, 1290, 1292, 1294, 1296, 1302, 1304, 1310, 1312, 1314, 1316, 1328, 1334, 1336, 1338, 1340, 1348, 1350, 1356, 1362, 1368, 1370, 1372, 1374, 1380, 1382, 1384, 1390, 1392, 1398, 1401, 1403, 1405, 1407, 1409, 1417, 1419, 1421, 1423, 1425, 1427, 1437, 1439, 1441, 1443, 1445, 1447, 1449, 1451, 1457, 1463, 1465, 1467, 1469, 1475, 1483, 1485, 1491, 1500, 1502, 1508, 1510, 1516, 1518, 1520, 1522, 1524, 1534, 1540, 1542, 1550, 1552, 1554, 1560, 1562, 1564, 1566, 1572, 1574, 1580, 1582, 1584, 1590, 1592, 1604, 1606, 1608, 1610, 1612, 1614, 1620, 1626, 1628, 1634, 1636, 1644, 1650, 1658, 1660, 1662, 1664, 1670, 1676, 1678, 1680, 1686, 1692, 1694, 1700, 1702, 1704, 1706, 1712, 1714, 1720, 1722, 1732, 1734, 1736, 1738, 1744, 1746, 1752, 1754, 1765, 1767, 1773, 1775, 1777, 1779, 1781, 1794, 1800, 1802, 1804, 1806, 1812, 1818, 1820, 1822, 1830, 1832, 1834, 1840, 1842, 1844, 1850, 1856, 1858, 1864, 1870, 1872, 1878, 1884, 1886, 1894, 1896, 1898, 1900, 1902, 1904, 1910, 1912, 1914, 1916, 1918, 1924, 1926, 1928, 1934, 1936, 1938, 1954, 1956, 1958, 1960, 1962, 1964, 1970, 1972, 1982, 1984, 1986, 2000, 2002, 2004, 2006, 2016, 2018, 2020, 2022, 2024, 2034, 2036, 2038, 2044, 2046, 2052, 2054, 2056, 2062, 2064, 2066, 2068, 2070, 2072, 2078, 2080, 2082, 2090, 2092, 2094, 2096, 2098, 2108, 2114, 2116, 2118, 2120, 2126, 2128, 2130, 2138, 2140, 2146, 2148, 2154, 2156, 2162, 2164, 2166, 2168, 2174, 2176, 2178, 2184, 2186, 2188, 2194, 2196, 2198, 2204, 2206, 2208, 2216, 2218, 2220, 2226, 2232, 2238, 2244, 2246, 2248, 2254, 2256, 2258, 2264, 2266, 2272, 2274, 2276, 2282, 2284, 2290, 2292, 2298, 2300, 2306, 2308, 2310, 2312, 2314, 2316, 2318, 2321, 2323, 2325, 2327, 2329, 2331, 2333, 2339, 2341, 2343, 2345, 2355, 2366, 2368, 2370, 2372, 2384, 2386, 2388, 2390, 2396, 2398, 2406, 2408, 2410, 2412, 2420, 2422, 2428, 2430, 2436, 2438, 2454, 2456, 2458, 2460, 2470, 2472, 2474, 2476, 2478, 2489, 2491, 2493, 2495, 2497, 2499, 2501, 2503, 2505, 2511, 2513, 2519, 2525, 2527, 2529, 2531, 2537, 2539, 2541, 2547, 2549, 2551, 2557, 2559, 2561, 2563, 2571, 2573, 2575, 2577, 2589, 2591, 2593, 2595, 2597, 2599, 2601, 2603, 2609, 2611, 2613, 2619, 2621, 2623, 2629, 2631, 2639, 2641, 2649, 2651, 2653, 2655, 2661, 2663, 2665, 2667, 2669, 2675, 2677, 2679, 2681, 2687, 2689, 2691, 2693, 2695, 2697, 2699, 2701, 2707, 2713, 2719, 2721, 2729, 2731, 2733, 2741, 2743, 2745, 2747, 2755, 2757, 2759, 2765, 2767, 2769, 2771, 2785, 2793, 2795, 2801, 2809, 2811, 2817, 2823, 2829, 2831, 2833, 2835, 2841, 2843, 2845, 2851, 2853, 2855, 2857, 2859, 2861, 2864, 2866, 2868, 2870, 2872, 2874, 2883, 2885, 2887, 2893, 2895, 2897, 2899, 2907, 2909, 2911, 2913, 2915, 2917, 2923, 2925, 2931, 2933, 2935, 2937, 2943, 2951, 2953, 2955, 2961, 2967, 2969, 2971, 2973, 2975, 2981, 2987, 2989, 2991, 2993, 2999, 3001, 3003, 3011, 3017, 3019, 3021, 3029, 3039, 3041, 3044, 3050, 3052, 3054, 3060, 3062, 3064, 3066, 3068, 3076, 3086, 3088, 3090, 3092, 3098, 3100, 3102, 3104, 3106, 3112, 3114, 3116, 3122, 3124, 3126, 3132, 3134, 3136, 3138, 3140, 3142, 3144, 3150, 3156, 3158, 3160, 3166, 3172, 3174, 3186, 3188, 3190, 3196, 3198, 3200, 3202, 3204, 3212, 3214, 3216, 3218, 3220, 3226, 3228, 3234, 3236, 3238, 3248, 3250, 3256, 3258, 3264, 3266, 3268, 3270, 3272, 3280, 3286, 3288, 3296, 3298, 3304, 3306, 3308, 3314, 3320, 3322, 3324, 3326, 3328, 3334, 3340, 3342, 3351, 3353, 3365, 3367, 3373, 3375, 3381, 3383, 3385, 3387, 3389, 3395, 3397, 3405, 3407, 3415, 3417, 3419, 3421, 3423, 3429, 3431, 3437, 3445, 3447, 3449, 3451, 3453, 3455, 3461, 3463, 3469, 3471, 3473, 3481, 3487, 3489, 3491, 3493, 3501, and 3503 shown in Tables 1-336.

40. The method of screening for anticancer activity according to claim 38, further comprising:
(d) comparing the level of expression in the absence of said drug candidate to the level of expression in the presence of the drug candidate.

41. The method of screening for anticancer activity according to claim 39, wherein the drug candidate is an inhibitor of transcription and further wherein the nucleic acid sequence is selected from the group consisting of SEQ ID NOS: 13, 21, 23, 25, 31, 33, 35, 37, 39, 41, 43, 49, 51, 53, 59, 61, 63, 77, 79, 81, 87, 89, 95, 97, 99, 113, 115, 117, 127, 129, 131, 133, 135, 137, 139, 141, 147, 149, 155, 161, 163, 165, 167, 169, 171, 173, 175, 181, 183, 185, 187, 189, 191, 193, 195, 197, 199, 201, 207, 209, 211, 217, 219, 225, 227, 229, 231, 237, 239, 245, 253, 255, 261, 263, 265, 267, 273, 275, 277, 279, 285, 287, 289, 301, 307, 309, 311, 317, 319, 321, 327, 333, 335, 344, 346, 348, 350, 352, 354, 364, 366, 376, 378, 380, 382, 384, 386, 388, 390, 396, 408, 410, 416, 418, 426, 432, 434, 436, 438, 440, 442, 448, 459, 461, 463, 469, 471, 477, 483, 485, 491, 493, 495, 497, 503, 505, 507, 509, 511, 517, 519, 521, 523, 525, 531, 533, 535, 541, 543, 549, 555, 557, 559, 561, 563, 565, 573, 575, 577, 579, 581, 589, 591, 597, 599, 605, 607, 613, 615, 621, 627, 629, 631, 637, 643, 645, 647, 649, 651, 653, 655, 657, 668, 674, 680, 682, 688, 697, 703, 709, 711, 717, 719, 721, 727, 729, 731, 733, 739, 741, 743, 749, 751, 757, 759, 765, 767, 773, 775, 783, 785, 787, 793, 795, 797, 803, 805, 807, 809, 811, 821, 823, 825, 831, 833, 835, 837, 839, 841, 843, 849, 851, 853, 867, 869, 875, 877, 879, 881, 883, 895, 901, 903, 909, 911, 913, 919, 921, 927, 929, 931, 937, 943, 945, 951, 953, 955, 961, 963, 969, 971, 973, 975, 981, 983, 985, 987, 999, 1001, 1003, 1005, 1007, 1013, 1015, 1017, 1019, 1021, 1027, 1029, 1035, 1037, 1039, 1041, 1043, 1049, 1058, 1060, 1062, 1064, 1066, 1068, 1070, 1072, 1078, 1080, 1082, 1088, 1090, 1096, 1102, 1108, 1110, 1112, 1114, 1116, 1122, 1128, 1134, 1136, 1142, 1144, 1150, 1156, 1158, 1160, 1166, 1168, 1174, 1176, 1178, 1184, 1186, 1192, 1194, 1196, 1208, 1210, 1212, 1218, 1220, 1226, 1228, 1230, 1232, 1238, 1244, 1246, 1248, 1254, 1256, 1258, 1260, 1262, 1264, 1266, 1272, 1274, 1276, 1278, 1280, 1282, 1288, 1290, 1292, 1294, 1296, 1302, 1304, 1310, 1312, 1314, 1316, 1328, 1334, 1336, 1338, 1340, 1348, 1350, 1356, 1362, 1368, 1370, 1372, 1374, 1380, 1382, 1384, 1390, 1392, 1398, 1401, 1403, 1405, 1407, 1409, 1417, 1419, 1421, 1423, 1425, 1427, 1437, 1439, 1441, 1443, 1445, 1447, 1449, 1451, 1457, 1463, 1465, 1467, 1469, 1475, 1483, 1485, 1491, 1500, 1502, 1508, 1510, 1516, 1518, 1520, 1522, 1524, 1534, 1540, 1542, 1550, 1552, 1554, 1560, 1562, 1564, 1566, 1572, 1574, 1580, 1582, 1584, 1590, 1592, 1604, 1606, 1608, 1610, 1612, 1614, 1620, 1626, 1628, 1634, 1636, 1644, 1650, 1658, 1660, 1662, 1664, 1670, 1676, 1678, 1680, 1686, 1692, 1694, 1700, 1702, 1704, 1706, 1712, 1714, 1720, 1722, 1732, 1734, 1736, 1738, 1744, 1746, 1752, 1754, 1765, 1767, 1773, 1775, 1777, 1779, 1781, 1794, 1800, 1802, 1804, 1806, 1812, 1818, 1820, 1822, 1830, 1832, 1834, 1840, 1842, 1844, 1850, 1856, 1858, 1864, 1870, 1872, 1878, 1884, 1886, 1894, 1896, 1898, 1900, 1902, 1904, 1910, 1912, 1914, 1916, 1918, 1924, 1926, 1928, 1934, 1936, 1938, 1954, 1956, 1958, 1960, 1962, 1964, 1970, 1972, 1982, 1984, 1986, 2000, 2002, 2004, 2006, 2016, 2018, 2020, 2022, 2024, 2034, 2036, 2038, 2044, 2046, 2052, 2054, 2056, 2062, 2064, 2066, 2068, 2070, 2072, 2078, 2080, 2082, 2090, 2092, 2094, 2096, 2098, 2108, 2114, 2116, 2118, 2120, 2126, 2128, 2130, 2138, 2140, 2146, 2148, 2154, 2156, 2162, 2164, 2166, 2168, 2174, 2176, 2178, 2184, 2186, 2188, 2194, 2196, 2198, 2204, 2206, 2208, 2216, 2218, 2220, 2226, 2232, 2238, 2244, 2246, 2248, 2254, 2256, 2258, 2264, 2266, 2272, 2274, 2276, 2282, 2284, 2290, 2292, 2298, 2300, 2306, 2308, 2310, 2312, 2314, 2316, 2318, 2321, 2323, 2325, 2327, 2329, 2331, 2333, 2339, 2341, 2343, 2345, 2355, 2366, 2368, 2370, 2372, 2384, 2386, 2388, 2390, 2396, 2398, 2406, 2408, 2410, 2412, 2420, 2422, 2428, 2430, 2436, 2438, 2454, 2456, 2458, 2460, 2470, 2472, 2474, 2476, 2478, 2489, 2491, 2493, 2495, 2497, 2499, 2501, 2503, 2505, 2511, 2513, 2519, 2525, 2527, 2529, 2531, 2537, 2539, 2541, 2547, 2549, 2551, 2557, 2559, 2561, 2563, 2571, 2573, 2575, 2577, 2589, 2591, 2593, 2595, 2597, 2599, 2601, 2603, 2609, 2611, 2613, 2619, 2621, 2623, 2629, 2631, 2639, 2641, 2649, 2651, 2653, 2655, 2661, 2663, 2665, 2667, 2669, 2675, 2677, 2679, 2681, 2687, 2689, 2691, 2693, 2695, 2697, 2699, 2701, 2707, 2713, 2719, 2721, 2729, 2731, 2733, 2741, 2743, 2745, 2747, 2755, 2757, 2759, 2765, 2767, 2769, 2771, 2785, 2793, 2795, 2801, 2809, 2811, 2817, 2823, 2829, 2831, 2833, 2835, 2841, 2843, 2845, 2851, 2853, 2855, 2857, 2859, 2861, 2864, 2866, 2868, 2870, 2872, 2874, 2883, 2885, 2887, 2893, 2895, 2897, 2899, 2907, 2909, 2911, 2913, 2915, 2917, 2923, 2925, 2931, 2933, 2935, 2937, 2943, 2951, 2953, 2955, 2961, 2967, 2969, 2971, 2973, 2975, 2981, 2987, 2989, 2991, 2993, 2999, 3001, 3003, 3011, 3017, 3019, 3021, 3029, 3039, 3041, 3044, 3050, 3052, 3054, 3060, 3062, 3064, 3066, 3068, 3076, 3086, 3088, 3090, 3092, 3098, 3100, 3102, 3104, 3106, 3112, 3114, 3116, 3122, 3124, 3126, 3132, 3134, 3136, 3138, 3140, 3142, 3144, 3150, 3156, 3158, 3160, 3166, 3172, 3174, 3186, 3188, 3190, 3196, 3198, 3200, 3202, 3204, 3212, 3214, 3216, 3218, 3220, 3226, 3228, 3234, 3236, 3238, 3248, 3250, 3256, 3258, 3264, 3266, 3268, 3270, 3272, 3280, 3286, 3288, 3296, 3298, 3304, 3306, 3308, 3314, 3320, 3322, 3324, 3326, 3328, 3334, 3340, 3342, 3351, 3353, 3365, 3367, 3373, 3375, 3381, 3383, 3385, 3387, 3389, 3395, 3397, 3405, 3407, 3415, 3417, 3419, 3421, 3423, 3429, 3431, 3437, 3445, 3447, 3449, 3451, 3453, 3455, 3461, 3463, 3469, 3471, 3473, 3481, 3487, 3489, 3491, 3493, 3501, and 3503 shown in Tables 1-336.

42. A method for detecting cancer associated with expression of a polypeptide in a test cell sample, comprising the steps of:
(i) detecting a level of expression of at least one polypeptide selected from the group consisting of SEQ ID NOS: 14, 22, 24, 26, 32, 34, 36, 38, 40, 42, 44, 50, 52, 54, 60, 62, 64, 78, 80, 82, 88, 90, 96, 98, 100, 114, 116, 118, 128, 130, 132, 134, 136, 138, 140, 142, 148, 150, 156, 162, 164, 166, 168, 170, 172, 174, 176, 182, 184, 186, 188, 190, 192, 194, 196, 198, 200, 202, 208, 210, 212, 218, 220, 226, 228, 230, 232, 238, 240, 246, 254, 256, 262, 264, 266, 268, 274, 276, 278, 280, 286, 288, 290, 302, 308, 310, 312, 318, 320, 322, 328, 334, 336, 345, 347, 349, 351, 353, 355, 365, 367, 377, 379, 381, 383, 385, 387, 389, 391, 397, 409, 411, 417, 419, 427, 433, 435, 437, 439, 441, 443, 449, 460, 462, 464, 470, 472, 478, 484, 486, 492, 494, 496, 498, 504, 506, 508, 510, 512, 518, 520, 522, 524, 526, 532, 534, 536, 542, 544, 550, 556, 558, 560, 562, 564, 566, 574, 576, 578, 580, 582, 590, 592, 598, 600, 606, 608, 614, 616, 622, 628, 630, 632, 638, 644, 646, 648, 650, 652, 654, 656, 658, 669, 675, 681, 683, 689, 698, 704, 710, 712, 718, 720, 722, 728, 730, 732, 734, 740, 742, 744, 750, 752, 758, 760, 766, 768, 774, 776, 784, 786, 788, 794, 796, 798, 804, 806, 808, 810, 812, 822, 824, 826, 832, 834, 836, 838, 840, 842, 844, 850, 852, 854, 868, 870, 876, 878, 880, 882, 884, 896, 902, 904, 910, 912, 914, 920, 922, 928, 930, 932, 938, 944, 946, 952, 954, 956, 962, 964, 970, 972, 974, 976, 982, 984, 986, 988, 1000, 1002, 1004, 1006, 1008, 1014, 1016, 1018, 1020, 1022, 1028, 1030, 1036, 1038, 1040, 1042, 1044, 1050, 1059, 1061, 1063, 1065, 1067, 1069, 1071, 1073, 1079, 1081, 1083, 1089, 1091, 1097, 1103, 1109, 1111, 1113, 1115, 1117, 1123, 1129, 1135, 1137, 1143, 1145, 1151, 1157, 1159, 1161, 1167, 1169, 1175, 1177, 1179, 1185, 1187, 1193, 1195, 1197, 1209, 1211, 1213, 1219, 1221, 1227, 1229, 1231, 1233, 1239, 1245, 1247, 1249, 1255, 1257, 1259, 1261, 1263, 1265, 1267, 1273, 1275, 1277, 1279, 1281, 1283, 1289, 1291, 1293, 1295, 1297, 1303, 1305, 1311, 1313, 1315, 1317, 1329, 1335, 1337, 1339, 1341, 1349, 1351, 1357, 1363, 1369, 1371, 1373, 1375, 1381, 1383, 1385, 1391, 1393, 1399, 1402, 1404, 1406, 1408, 1410, 1418, 1420, 1422, 1424, 1426, 1428, 1438, 1440, 1442, 1444, 1446, 1448, 1450, 1452, 1458, 1464, 1466, 1468, 1470, 1476, 1484, 1486, 1492, 1501, 1503, 1509, 1511, 1517, 1519, 1521, 1523, 1525, 1535, 1541, 1543, 1551, 1553, 1555, 1561, 1563, 1565, 1567, 1573, 1575, 1581, 1583, 1585, 1591, 1593, 1605, 1607, 1609, 1611, 1613, 1615, 1621, 1627, 1629, 1635, 1637, 1645, 1651, 1659, 1661, 1663, 1665, 1671, 1677, 1679, 1681, 1687, 1693, 1695, 1701, 1703, 1705, 1707, 1713, 1715, 1721, 1723, 1733, 1735, 1737, 1739, 1745, 1747, 1753, 1755, 1766, 1768, 1774, 1776, 1778, 1780, 1782, 1795, 1801, 1803, 1805, 1807, 1813, 1819, 1821, 1823, 1831, 1833, 1835, 1841, 1843, 1845, 1851, 1857, 1859, 1865, 1871, 1873, 1879, 1885, 1887, 1895, 1897, 1899, 1901, 1903, 1905, 1911, 1913, 1915, 1917, 1919, 1925, 1927, 1929, 1935, 1937, 1939, 1955, 1957, 1959, 1961, 1963, 1965, 1971, 1973, 1983, 1985, 1987, 2001, 2003, 2005, 2007, 2017, 2019, 2021, 2023, 2025, 2035, 2037, 2039, 2045, 2047, 2053, 2055, 2057, 2063, 2065, 2067, 2069, 2071, 2073, 2079, 2081, 2083, 2091, 2093, 2095, 2097, 2099, 2109, 2115, 2117, 2119, 2121, 2127, 2129, 2131, 2139, 2141, 2147, 2149, 2155, 2157, 2163, 2165, 2167, 2169, 2175, 2177, 2179, 2185, 2187, 2189, 2195, 2197, 2199, 2205, 2207, 2209, 2217, 2219, 2221, 2227, 2233, 2239, 2245, 2247, 2249, 2255, 2257, 2259, 2265, 2267, 2273, 2275, 2277, 2283, 2285, 2291, 2293, 2299, 2301, 2307, 2309, 2311, 2313, 2315, 2317, 2319, 2322, 2324, 2326, 2328, 2330, 2332, 2334, 2340, 2342, 2344, 2346, 2356, 2367, 2369, 2371, 2373, 2385, 2387, 2389, 2391, 2397, 2399, 2407, 2409, 2411, 2413, 2421, 2423, 2429, 2431, 2437, 2439, 2455, 2457, 2459, 2461, 2471, 2473, 2475, 2477, 2479, 2490, 2492, 2494, 2496, 2498, 2500, 2502, 2504, 2506, 2512, 2514, 2520, 2526, 2528, 2530, 2532, 2538, 2540, 2542, 2548, 2550, 2552, 2558, 2560, 2562, 2564, 2572, 2574, 2576, 2578, 2590, 2592, 2594, 2596, 2598, 2600, 2602, 2604, 2610, 2612, 2614, 2620, 2622, 2624, 2630, 2632, 2640, 2642, 2650, 2652, 2654, 2656, 2662, 2664, 2666, 2668, 2670, 2676, 2678, 2680, 2682, 2688, 2690, 2692, 2694, 2696, 2698, 2700, 2702, 2708, 2714, 2720, 2722, 2730, 2732, 2734, 2742, 2744, 2746, 2748, 2756, 2758, 2760, 2766, 2768, 2770, 2772, 2786, 2794, 2796, 2802, 2810, 2812, 2818, 2824, 2830, 2832, 2834, 2836, 2842, 2844, 2846, 2852, 2854, 2856, 2858, 2860, 2862, 2865, 2867, 2869, 2871, 2873, 2875, 2884, 2886, 2888, 2894, 2896, 2898, 2900, 2908, 2910, 2912, 2914, 2916, 2918, 2924, 2926, 2932, 2934, 2936, 2938, 2944, 2952, 2954, 2956, 2962, 2968, 2970, 2972, 2974, 2976, 2982, 2988, 2990, 2992, 2994, 3000, 3002, 3004, 3012, 3018, 3020, 3022, 3030, 3040, 3042, 3045, 3051, 3053, 3055, 3061, 3063, 3065, 3067, 3069, 3077, 3087, 3089, 3091, 3093, 3099, 3101, 3103, 3105, 3107, 3113, 3115, 3117, 3123, 3125, 3127, 3133, 3135, 3137, 3139, 3141, 3143, 3145, 3151, 3157, 3159, 3161, 3167, 3173, 3175, 3187, 3189, 3191, 3197, 3199, 3201, 3203, 3205, 3213, 3215, 3217, 3219, 3221, 3227, 3229, 3235, 3237, 3239, 3249, 3251, 3257, 3259, 3265, 3267, 3269, 3271, 3273, 3281, 3287, 3289, 3297, 3299, 3305, 3307, 3309, 3315, 3321, 3323, 3325, 3327, 3329, 3335, 3341, 3343, 3352, 3354, 3366, 3368, 3374, 3376, 3382, 3384, 3386, 3388, 3390, 3396, 3398, 3406, 3408, 3416, 3418, 3420, 3422, 3424, 3430, 3432, 3438, 3446, 3448, 3450, 3452, 3454, 3456, 3462, 3464, 3470, 3472, 3474, 3482, 3488, 3490, 3492, 3494, 3502, and 3504 shown in Tables 1-336, or a fragment thereof; and
(ii) comparing the level of expression of the polypeptide in the test sample with a level of expression of polypeptide in a normal cell sample, wherein an altered level of expression of the polypeptide in the test cell sample relative to the level of polypeptide expression in the normal cell sample is indicative of the presence of cancer in the test cell sample.

43. A method for detecting cancer associated with expression of a polypeptide in a test cell sample, comprising the steps of:
(i) detecting a level of activity of at least one polypeptide selected from the group consisting of SEQ ID NOS: 14, 22, 24, 26, 32, 34, 36, 38, 40, 42, 44, 50, 52, 54, 60, 62, 64, 78, 80, 82, 88, 90, 96, 98, 100, 114, 116, 118, 128, 130, 132, 134, 136, 138, 140, 142, 148, 150, 156, 162, 164, 166, 168, 170, 172, 174, 176, 182, 184, 186, 188, 190, 192, 194, 196, 198, 200, 202, 208, 210, 212, 218, 220, 226, 228, 230, 232, 238, 240, 246, 254, 256, 262, 264, 266, 268, 274, 276, 278, 280, 286, 288, 290, 302, 308, 310, 312, 318, 320, 322, 328, 334, 336, 345, 347, 349, 351, 353, 355, 365, 367, 377, 379, 381, 383, 385, 387, 389, 391, 397, 409, 411, 417, 419, 427, 433, 435, 437, 439, 441, 443, 449, 460, 462, 464, 470, 472, 478, 484, 486, 492, 494, 496, 498, 504, 506, 508, 510, 512, 518, 520, 522, 524, 526, 532, 534, 536, 542, 544, 550, 556, 558, 560, 562, 564, 566, 574, 576, 578, 580, 582, 590, 592, 598, 600, 606, 608, 614, 616, 622, 628, 630, 632, 638, 644, 646, 648, 650, 652, 654, 656, 658, 669, 675, 681, 683, 689, 698, 704, 710, 712, 718, 720, 722, 728, 730, 732, 734, 740, 742, 744, 750, 752, 758, 760, 766, 768, 774, 776, 784, 786, 788, 794, 796, 798, 804, 806, 808, 810, 812, 822, 824, 826, 832, 834, 836, 838, 840, 842, 844, 850, 852, 854, 868, 870, 876, 878, 880, 882, 884, 896, 902, 904, 910, 912, 914, 920, 922, 928, 930, 932, 938, 944, 946, 952, 954, 956, 962, 964, 970, 972, 974, 976, 982, 984, 986, 988, 1000, 1002, 1004, 1006, 1008, 1014, 1016, 1018, 1020, 1022, 1028, 1030, 1036, 1038, 1040, 1042, 1044, 1050, 1059, 1061, 1063, 1065, 1067, 1069, 1071, 1073, 1079, 1081, 1083, 1089, 1091, 1097, 1103, 1109, 1111, 1113, 1115, 1117, 1123, 1129, 1135, 1137, 1143, 1145, 1151, 1157, 1159, 1161, 1167, 1169, 1175, 1177, 1179, 1185, 1187, 1193, 1195, 1197, 1209, 1211, 1213, 1219, 1221, 1227, 1229, 1231, 1233, 1239, 1245, 1247, 1249, 1255, 1257, 1259, 1261, 1263, 1265, 1267, 1273, 1275, 1277, 1279, 1281, 1283, 1289, 1291, 1293, 1295, 1297, 1303, 1305, 1311, 1313, 1315, 1317, 1329, 1335, 1337, 1339, 1341, 1349, 1351, 1357, 1363, 1369, 1371, 1373, 1375, 1381, 1383, 1385, 1391, 1393, 1399, 1402, 1404, 1406, 1408, 1410, 1418, 1420, 1422, 1424, 1426, 1428, 1438, 1440, 1442, 1444, 1446, 1448, 1450, 1452, 1458, 1464, 1466, 1468, 1470, 1476, 1484, 1486, 1492, 1501, 1503, 1509, 1511, 1517, 1519, 1521, 1523, 1525, 1535, 1541, 1543, 1551, 1553, 1555, 1561, 1563, 1565, 1567, 1573, 1575, 1581, 1583, 1585, 1591, 1593, 1605, 1607, 1609, 1611, 1613, 1615, 1621, 1627, 1629, 1635, 1637, 1645, 1651, 1659, 1661, 1663, 1665, 1671, 1677, 1679, 1681, 1687, 1693, 1695, 1701, 1703, 1705, 1707, 1713, 1715, 1721, 1723, 1733, 1735, 1737, 1739, 1745, 1747, 1753, 1755, 1766, 1768, 1774, 1776, 1778, 1780, 1782, 1795, 1801, 1803, 1805, 1807, 1813, 1819, 1821, 1823, 1831, 1833, 1835, 1841, 1843, 1845, 1851, 1857, 1859, 1865, 1871, 1873, 1879, 1885, 1887, 1895, 1897, 1899, 1901, 1903, 1905, 1911, 1913, 1915, 1917, 1919, 1925, 1927, 1929, 1935, 1937, 1939, 1955, 1957, 1959, 1961, 1963, 1965, 1971, 1973, 1983, 1985, 1987, 2001, 2003, 2005, 2007, 2017, 2019, 2021, 2023, 2025, 2035, 2037, 2039, 2045, 2047, 2053, 2055, 2057, 2063, 2065, 2067, 2069, 2071, 2073, 2079, 2081, 2083, 2091, 2093, 2095, 2097, 2099, 2109, 2115, 2117, 2119, 2121, 2127, 2129, 2131, 2139, 2141, 2147, 2149, 2155, 2157, 2163, 2165, 2167, 2169, 2175, 2177, 2179, 2185, 2187, 2189, 2195, 2197, 2199, 2205, 2207, 2209, 2217, 2219, 2221, 2227, 2233, 2239, 2245, 2247, 2249, 2255, 2257, 2259, 2265, 2267, 2273, 2275, 2277, 2283, 2285, 2291, 2293, 2299, 2301, 2307, 2309, 2311, 2313, 2315, 2317, 2319, 2322, 2324, 2326, 2328, 2330, 2332, 2334, 2340, 2342, 2344, 2346, 2356, 2367, 2369, 2371, 2373, 2385, 2387, 2389, 2391, 2397, 2399, 2407, 2409, 2411, 2413, 2421, 2423, 2429, 2431, 2437, 2439, 2455, 2457, 2459, 2461, 2471, 2473, 2475, 2477, 2479, 2490, 2492, 2494, 2496, 2498, 2500, 2502, 2504, 2506, 2512, 2514, 2520, 2526, 2528, 2530, 2532, 2538, 2540, 2542, 2548, 2550, 2552, 2558, 2560, 2562, 2564, 2572, 2574, 2576, 2578, 2590, 2592, 2594, 2596, 2598, 2600, 2602, 2604, 2610, 2612, 2614, 2620, 2622, 2624, 2630, 2632, 2640, 2642, 2650, 2652, 2654, 2656, 2662, 2664, 2666, 2668, 2670, 2676, 2678, 2680, 2682, 2688, 2690, 2692, 2694, 2696, 2698, 2700, 2702, 2708, 2714, 2720, 2722, 2730, 2732, 2734, 2742, 2744, 2746, 2748, 2756, 2758, 2760, 2766, 2768, 2770, 2772, 2786, 2794, 2796, 2802, 2810, 2812, 2818, 2824, 2830, 2832, 2834, 2836, 2842, 2844, 2846, 2852, 2854, 2856, 2858, 2860, 2862, 2865, 2867, 2869, 2871, 2873, 2875, 2884, 2886, 2888, 2894, 2896, 2898, 2900, 2908, 2910, 2912, 2914, 2916, 2918, 2924, 2926, 2932, 2934, 2936, 2938, 2944, 2952, 2954, 2956, 2962, 2968, 2970, 2972, 2974, 2976, 2982, 2988, 2990, 2992, 2994, 3000, 3002, 3004, 3012, 3018, 3020, 3022, 3030, 3040, 3042, 3045, 3051, 3053, 3055, 3061, 3063, 3065, 3067, 3069, 3077, 3087, 3089, 3091, 3093, 3099, 3101, 3103, 3105, 3107, 3113, 3115, 3117, 3123, 3125, 3127, 3133, 3135, 3137, 3139, 3141, 3143, 3145, 3151, 3157, 3159, 3161, 3167, 3173, 3175, 3187, 3189, 3191, 3197, 3199, 3201, 3203, 3205, 3213, 3215, 3217, 3219, 3221, 3227, 3229, 3235, 3237, 3239, 3249, 3251, 3257, 3259, 3265, 3267, 3269, 3271, 3273, 3281, 3287, 3289, 3297, 3299, 3305, 3307, 3309, 3315, 3321, 3323, 3325, 3327, 3329, 3335, 3341, 3343, 3352, 3354, 3366, 3368, 3374, 3376, 3382, 3384, 3386, 3388, 3390, 3396, 3398, 3406, 3408, 3416, 3418, 3420, 3422, 3424, 3430, 3432, 3438, 3446, 3448, 3450, 3452, 3454, 3456, 3462, 3464, 3470, 3472, 3474, 3482, 3488, 3490, 3492, 3494, 3502, and 3504 shown in Tables 1-336, or a fragment thereof, wherein said activity corresponds to at least one activity for the polypeptide listed in Tables 1-336; and
(ii) comparing the level of activity of the polypeptide in the test sample with a level of activity of polypeptide in a normal cell sample, wherein an altered level of activity of the polypeptide in the test cell sample relative to the level of polypeptide activity in the normal cell sample is indicative of the presence of cancer in the test cell sample.

44. A method for detecting cancer associated with the presence of an antibody in a test serum sample, comprising the steps of:
(i) detecting a level of an antibody against an antigenic polypeptide selected from the group consisting of SEQ ID NOS: 14, 22, 24, 26, 32, 34, 36, 38, 40, 42, 44, 50, 52, 54, 60, 62, 64, 78, 80, 82, 88, 90, 96, 98, 100, 114, 116, 118, 128, 130, 132, 134, 136, 138, 140, 142, 148, 150, 156, 162, 164, 166, 168, 170, 172, 174, 176, 182, 184, 186, 188, 190, 192, 194, 196, 198, 200, 202, 208, 210, 212, 218, 220, 226, 228, 230, 232, 238, 240, 246, 254, 256, 262, 264, 266, 268, 274, 276, 278, 280, 286, 288, 290, 302, 308, 310, 312, 318, 320, 322, 328, 334, 336, 345, 347, 349, 351, 353, 355, 365, 367, 377, 379, 381, 383, 385, 387, 389, 391, 397, 409, 411, 417, 419, 427, 433, 435, 437, 439, 441, 443, 449, 460, 462, 464, 470, 472, 478, 484, 486, 492, 494, 496, 498, 504, 506, 508, 510, 512, 518, 520, 522, 524, 526, 532, 534, 536, 542, 544, 550, 556, 558, 560, 562, 564, 566, 574, 576, 578, 580, 582, 590, 592, 598, 600, 606, 608, 614, 616, 622, 628, 630, 632, 638, 644, 646, 648, 650, 652, 654, 656, 658, 669, 675, 681, 683, 689, 698, 704, 710, 712, 718, 720, 722, 728, 730, 732, 734, 740, 742, 744, 750, 752, 758, 760, 766, 768, 774, 776, 784, 786, 788, 794, 796, 798, 804, 806, 808, 810, 812, 822, 824, 826, 832, 834, 836, 838, 840, 842, 844, 850, 852, 854, 868, 870, 876, 878, 880, 882, 884, 896, 902, 904, 910, 912, 914, 920, 922, 928, 930, 932, 938, 944, 946, 952, 954, 956, 962, 964, 970, 972, 974, 976, 982, 984, 986, 988, 1000, 1002, 1004, 1006, 1008, 1014, 1016, 1018, 1020, 1022, 1028, 1030, 1036, 1038, 1040, 1042, 1044, 1050, 1059, 1061, 1063, 1065, 1067, 1069, 1071, 1073, 1079, 1081, 1083, 1089, 1091, 1097, 1103, 1109, 1111, 1113, 1115, 1117, 1123, 1129, 1135, 1137, 1143, 1145, 1151, 1157, 1159, 1161, 1167, 1169, 1175, 1177, 1179, 1185, 1187, 1193, 1195, 1197, 1209, 1211, 1213, 1219, 1221, 1227, 1229, 1231, 1233, 1239, 1245, 1247, 1249, 1255, 1257, 1259, 1261, 1263, 1265, 1267, 1273, 1275, 1277, 1279, 1281, 1283, 1289, 1291, 1293, 1295, 1297, 1303, 1305, 1311, 1313, 1315, 1317, 1329, 1335, 1337, 1339, 1341, 1349, 1351, 1357, 1363, 1369, 1371, 1373, 1375, 1381, 1383, 1385, 1391, 1393, 1399, 1402, 1404, 1406, 1408, 1410, 1418, 1420, 1422, 1424, 1426, 1428, 1438, 1440, 1442, 1444, 1446, 1448, 1450, 1452, 1458, 1464, 1466, 1468, 1470, 1476, 1484, 1486, 1492, 1501, 1503, 1509, 1511, 1517, 1519, 1521, 1523, 1525, 1535, 1541, 1543, 1551, 1553, 1555, 1561, 1563, 1565, 1567, 1573, 1575, 1581, 1583, 1585, 1591, 1593, 1605, 1607, 1609, 1611, 1613, 1615, 1621, 1627, 1629, 1635, 1637, 1645, 1651, 1659, 1661, 1663, 1665, 1671, 1677, 1679, 1681, 1687, 1693, 1695, 1701, 1703, 1705, 1707, 1713, 1715, 1721, 1723, 1733, 1735, 1737, 1739, 1745, 1747, 1753, 1755, 1766, 1768, 1774, 1776, 1778, 1780, 1782, 1795, 1801, 1803, 1805, 1807, 1813, 1819, 1821, 1823, 1831, 1833, 1835, 1841, 1843, 1845, 1851, 1857, 1859, 1865, 1871, 1873, 1879, 1885, 1887, 1895, 1897, 1899, 1901, 1903, 1905, 1911, 1913, 1915, 1917, 1919, 1925, 1927, 1929, 1935, 1937, 1939, 1955, 1957, 1959, 1961, 1963, 1965, 1971, 1973, 1983, 1985, 1987, 2001, 2003, 2005, 2007, 2017, 2019, 2021, 2023, 2025, 2035, 2037, 2039, 2045, 2047, 2053, 2055, 2057, 2063, 2065, 2067, 2069, 2071, 2073, 2079, 2081, 2083, 2091, 2093, 2095, 2097, 2099, 2109, 2115, 2117, 2119, 2121, 2127, 2129, 2131, 2139, 2141, 2147, 2149, 2155, 2157, 2163, 2165, 2167, 2169, 2175, 2177, 2179, 2185, 2187, 2189, 2195, 2197, 2199, 2205, 2207, 2209, 2217, 2219, 2221, 2227, 2233, 2239, 2245, 2247, 2249, 2255, 2257, 2259, 2265, 2267, 2273, 2275, 2277, 2283, 2285, 2291, 2293, 2299, 2301, 2307, 2309, 2311, 2313, 2315, 2317, 2319, 2322, 2324, 2326, 2328, 2330, 2332, 2334, 2340, 2342, 2344, 2346, 2356, 2367, 2369, 2371, 2373, 2385, 2387, 2389, 2391, 2397, 2399, 2407, 2409, 2411, 2413, 2421, 2423, 2429, 2431, 2437, 2439, 2455, 2457, 2459, 2461, 2471, 2473, 2475, 2477, 2479, 2490, 2492, 2494, 2496, 2498, 2500, 2502, 2504, 2506, 2512, 2514, 2520, 2526, 2528, 2530, 2532, 2538, 2540, 2542, 2548, 2550, 2552, 2558, 2560, 2562, 2564, 2572, 2574, 2576, 2578, 2590, 2592, 2594, 2596, 2598, 2600, 2602, 2604, 2610, 2612, 2614, 2620, 2622, 2624, 2630, 2632, 2640, 2642, 2650, 2652, 2654, 2656, 2662, 2664, 2666, 2668, 2670, 2676, 2678, 2680, 2682, 2688, 2690, 2692, 2694, 2696, 2698, 2700, 2702, 2708, 2714, 2720, 2722, 2730, 2732, 2734, 2742, 2744, 2746, 2748, 2756, 2758, 2760, 2766, 2768, 2770, 2772, 2786, 2794, 2796, 2802, 2810, 2812, 2818, 2824, 2830, 2832, 2834, 2836, 2842, 2844, 2846, 2852, 2854, 2856, 2858, 2860, 2862, 2865, 2867, 2869, 2871, 2873, 2875, 2884, 2886, 2888, 2894, 2896, 2898, 2900, 2908, 2910, 2912, 2914, 2916, 2918, 2924, 2926, 2932, 2934, 2936, 2938, 2944, 2952, 2954, 2956, 2962, 2968, 2970, 2972, 2974, 2976, 2982, 2988, 2990, 2992, 2994, 3000, 3002, 3004, 3012, 3018, 3020, 3022, 3030, 3040, 3042, 3045, 3051, 3053, 3055, 3061, 3063, 3065, 3067, 3069, 3077, 3087, 3089, 3091, 3093, 3099, 3101, 3103, 3105, 3107, 3113, 3115, 3117, 3123, 3125, 3127, 3133, 3135, 3137, 3139, 3141, 3143, 3145, 3151, 3157, 3159, 3161, 3167, 3173, 3175, 3187, 3189, 3191, 3197, 3199, 3201, 3203, 3205, 3213, 3215, 3217, 3219, 3221, 3227, 3229, 3235, 3237, 3239, 3249, 3251, 3257, 3259, 3265, 3267, 3269, 3271, 3273, 3281, 3287, 3289, 3297, 3299, 3305, 3307, 3309, 3315, 3321, 3323, 3325, 3327, 3329, 3335, 3341, 3343, 3352, 3354, 3366, 3368, 3374, 3376, 3382, 3384, 3386, 3388, 3390, 3396, 3398, 3406, 3408, 3416, 3418, 3420, 3422, 3424, 3430, 3432, 3438, 3446, 3448, 3450, 3452, 3454, 3456, 3462, 3464, 3470, 3472, 3474, 3482, 3488, 3490, 3492, 3494, 3502, and 3504 shown in Tables 1-336, or antigenic fragment thereof; and
(ii) comparing said level of said antibody in the test sample with a level of said antibody in the control sample, wherein an altered level of antibody in said test sample relative to the level of antibody in the control sample is indicative of the presence of cancer in the test serum sample.

45. A method for screening for a bioactive agent capable of modulating the activity of a CA protein (CAP), wherein said CAP is encoded by a nucleic acid comprising a nucleic acid sequence selected from the group consisting of the polynucleotide sequences SEQ ID NOS: 13, 21, 23, 25, 31, 33, 35, 37, 39, 41, 43, 49, 51, 53, 59, 61, 63, 77, 79, 81, 87, 89, 95, 97, 99, 113, 115, 117, 127, 129, 131, 133, 135, 137, 139, 141, 147, 149, 155, 161, 163, 165, 167, 169, 171, 173, 175, 181, 183, 185, 187, 189, 191, 193, 195, 197, 199, 201, 207, 209, 211, 217, 219, 225, 227, 229, 231, 237, 239, 245, 253, 255, 261, 263, 265, 267, 273, 275, 277, 279, 285, 287, 289, 301, 307, 309, 311, 317, 319, 321, 327, 333, 335, 344, 346, 348, 350, 352, 354, 364, 366, 376, 378, 380, 382, 384, 386, 388, 390, 396, 408, 410, 416, 418, 426, 432, 434, 436, 438, 440, 442, 448, 459, 461, 463, 469, 471, 477, 483, 485, 491, 493, 495, 497, 503, 505, 507, 509, 511, 517, 519, 521, 523, 525, 531, 533, 535, 541, 543, 549, 555, 557, 559, 561, 563, 565, 573, 575, 577, 579, 581, 589, 591, 597, 599, 605, 607, 613, 615, 621, 627, 629, 631, 637, 643, 645, 647, 649, 651, 653, 655, 657, 668, 674, 680, 682, 688, 697, 703, 709, 711, 717, 719, 721, 727, 729, 731, 733, 739, 741, 743, 749, 751, 757, 759, 765, 767, 773, 775, 783, 785, 787, 793, 795, 797, 803, 805, 807, 809, 811, 821, 823, 825, 831, 833, 835, 837, 839, 841, 843, 849, 851, 853, 867, 869, 875, 877, 879, 881, 883, 895, 901, 903, 909, 911, 913, 919, 921, 927, 929, 931, 937, 943, 945, 951, 953, 955, 961, 963, 969, 971, 973, 975, 981, 983, 985, 987, 999, 1001, 1003, 1005, 1007, 1013, 1015, 1017, 1019, 1021, 1027, 1029, 1035, 1037, 1039, 1041, 1043, 1049, 1058, 1060, 1062, 1064, 1066, 1068, 1070, 1072, 1078, 1080, 1082, 1088, 1090, 1096, 1102, 1108, 1110, 1112, 1114, 1116, 1122, 1128, 1134, 1136, 1142, 1144, 1150, 1156, 1158, 1160, 1166, 1168, 1174, 1176, 1178, 1184, 1186, 1192, 1194, 1196, 1208, 1210, 1212, 1218, 1220, 1226, 1228, 1230, 1232, 1238, 1244, 1246, 1248, 1254, 1256, 1258, 1260, 1262, 1264, 1266, 1272, 1274, 1276, 1278, 1280, 1282, 1288, 1290, 1292, 1294, 1296, 1302, 1304, 1310, 1312, 1314, 1316, 1328, 1334, 1336, 1338, 1340, 1348, 1350, 1356, 1362, 1368, 1370, 1372, 1374, 1380, 1382, 1384, 1390, 1392, 1398, 1401, 1403, 1405, 1407, 1409, 1417, 1419, 1421, 1423, 1425, 1427, 1437, 1439, 1441, 1443, 1445, 1447, 1449, 1451, 1457, 1463, 1465, 1467, 1469, 1475, 1483, 1485, 1491, 1500, 1502, 1508, 1510, 1516, 1518, 1520, 1522, 1524, 1534, 1540, 1542, 1550, 1552, 1554, 1560, 1562, 1564, 1566, 1572, 1574, 1580, 1582, 1584, 1590, 1592, 1604, 1606, 1608, 1610, 1612, 1614, 1620, 1626, 1628, 1634, 1636, 1644, 1650, 1658, 1660, 1662, 1664, 1670, 1676, 1678, 1680, 1686, 1692, 1694, 1700, 1702, 1704, 1706, 1712, 1714, 1720, 1722, 1732, 1734, 1736, 1738, 1744, 1746, 1752, 1754, 1765, 1767, 1773, 1775, 1777, 1779, 1781, 1794, 1800, 1802, 1804, 1806, 1812, 1818, 1820, 1822, 1830, 1832, 1834, 1840, 1842, 1844, 1850, 1856, 1858, 1864, 1870, 1872, 1878, 1884, 1886, 1894, 1896, 1898, 1900, 1902, 1904, 1910, 1912, 1914, 1916, 1918, 1924, 1926, 1928, 1934, 1936, 1938, 1954, 1956, 1958, 1960, 1962, 1964, 1970, 1972, 1982, 1984, 1986, 2000, 2002, 2004, 2006, 2016, 2018, 2020, 2022, 2024, 2034, 2036, 2038, 2044, 2046, 2052, 2054, 2056, 2062, 2064, 2066, 2068, 2070, 2072, 2078, 2080, 2082, 2090, 2092, 2094, 2096, 2098, 2108, 2114, 2116, 2118, 2120, 2126, 2128, 2130, 2138, 2140, 2146, 2148, 2154, 2156, 2162, 2164, 2166, 2168, 2174, 2176, 2178, 2184, 2186, 2188, 2194, 2196, 2198, 2204, 2206, 2208, 2216, 2218, 2220, 2226, 2232, 2238, 2244, 2246, 2248, 2254, 2256, 2258, 2264, 2266, 2272, 2274, 2276, 2282, 2284, 2290, 2292, 2298, 2300, 2306, 2308, 2310, 2312, 2314, 2316, 2318, 2321, 2323, 2325, 2327, 2329, 2331, 2333, 2339, 2341, 2343, 2345, 2355, 2366, 2368, 2370, 2372, 2384, 2386, 2388, 2390, 2396, 2398, 2406, 2408, 2410, 2412, 2420, 2422, 2428, 2430, 2436, 2438, 2454, 2456, 2458, 2460, 2470, 2472, 2474, 2476, 2478, 2489, 2491, 2493, 2495, 2497, 2499, 2501, 2503, 2505, 2511, 2513, 2519, 2525, 2527, 2529, 2531, 2537, 2539, 2541, 2547, 2549, 2551, 2557, 2559, 2561, 2563, 2571, 2573, 2575, 2577, 2589, 2591, 2593, 2595, 2597, 2599, 2601, 2603, 2609, 2611, 2613, 2619, 2621, 2623, 2629, 2631, 2639, 2641, 2649, 2651, 2653, 2655, 2661, 2663, 2665, 2667, 2669, 2675, 2677, 2679, 2681, 2687, 2689, 2691, 2693, 2695, 2697, 2699, 2701, 2707, 2713, 2719, 2721, 2729, 2731, 2733, 2741, 2743, 2745, 2747, 2755, 2757, 2759, 2765, 2767, 2769, 2771, 2785, 2793, 2795, 2801, 2809, 2811, 2817, 2823, 2829, 2831, 2833, 2835, 2841, 2843, 2845, 2851, 2853, 2855, 2857, 2859, 2861, 2864, 2866, 2868, 2870, 2872, 2874, 2883, 2885, 2887, 2893, 2895, 2897, 2899, 2907, 2909, 2911, 2913, 2915, 2917, 2923, 2925, 2931, 2933, 2935, 2937, 2943, 2951, 2953, 2955, 2961, 2967, 2969, 2971, 2973, 2975, 2981, 2987, 2989, 2991, 2993, 2999, 3001, 3003, 3011, 3017, 3019, 3021, 3029, 3039, 3041, 3044, 3050, 3052, 3054, 3060, 3062, 3064, 3066, 3068, 3076, 3086, 3088, 3090, 3092, 3098, 3100, 3102, 3104, 3106, 3112, 3114, 3116, 3122, 3124, 3126, 3132, 3134, 3136, 3138, 3140, 3142, 3144, 3150, 3156, 3158, 3160, 3166, 3172, 3174, 3186, 3188, 3190, 3196, 3198, 3200, 3202, 3204, 3212, 3214, 3216, 3218, 3220, 3226, 3228, 3234, 3236, 3238, 3248, 3250, 3256, 3258, 3264, 3266, 3268, 3270, 3272, 3280, 3286, 3288, 3296, 3298, 3304, 3306, 3308, 3314, 3320, 3322, 3324, 3326, 3328, 3334, 3340, 3342, 3351, 3353, 3365, 3367, 3373, 3375, 3381, 3383, 3385, 3387, 3389, 3395, 3397, 3405, 3407, 3415, 3417, 3419, 3421, 3423, 3429, 3431, 3437, 3445, 3447, 3449, 3451, 3453, 3455, 3461, 3463, 3469, 3471, 3473, 3481, 3487, 3489, 3491, 3493, 3501, and 3503 shown in Tables 1-336, said method comprising:
a) combining said CAP and a candidate bioactive agent; and
b) determining the effect of the candidate agent on the bioactivity of said CAP.

46. The method of screening for the bioactive agent according to claim 45, wherein the bioactive agent affects the expression of the CA protein (CAP).

47. The method of screening for the bioactive agent according to claim 45, wherein the bioactive agent affects the activity of the CA protein (CAP), wherein such activity is selected from the activities listed in Tables 1-336.

48. The method of screening for the bioactive agent according to claim 45, wherein the bioactive agent is a modulator of an activity selected from the group consisting of: G-protein coupled receptor, nucleotide binding, nucleic acid binding, calcium binding protein, apoptosis, cell cycle regulator, chromatin protein. transcription factor, transport protein, signal transduction, nuclear receptor, growth factor, protein kinase, protein phosphorylase, peptidase, electron transport, thioredoxin, semaphorin, signaling, and motility as shown in Tables 1-336.

49. A method for diagnosing cancer comprising:
a) determining the expression of one or more genes comprising a nucleic acid sequence selected from the group consisting of the human genomic and mRNA sequences outlined in Tables 1-336, in a first tissue type of a first individual; and
b) comparing said expression of said gene(s) from a second normal tissue type from said first individual or a second unaffected individual;
wherein a difference in said expression indicates that the first individual has cancer.

50. A method for treating cancers comprising administering to a patient an inhibitor of a CA protein (CAP), wherein said CAP is encoded by a nucleic acid comprising a nucleic acid sequence selected from the group consisting of the human nucleic acid sequences in Tables 1-336.

51. The method for treating cancers according to claim 50, wherein the inhibitor of a CA protein (CAP) binds to the CA protein.

52. A method for inhibiting expression of a cancer associated (CA) gene in a cell comprising:
contacting a cell expressing a CA gene with a double stranded RNA comprising a sequence capable of hybridizing to a cancer associated (CA) mRNA corresponding to the polynucleotide sequences of SEQ ID NOS: 13, 21, 23, 25, 31, 33, 35, 37, 39, 41, 43, 49, 51, 53, 59, 61, 63, 77, 79, 81, 87, 89, 95, 97, 99, 113, 115, 117, 127, 129, 131, 133, 135, 137, 139, 141, 147, 149, 155, 161, 163, 165, 167, 169, 171, 173, 175, 181, 183, 185, 187, 189, 191, 193, 195, 197, 199, 201, 207, 209, 211, 217, 219, 225, 227, 229, 231, 237, 239, 245, 253, 255, 261, 263, 265, 267, 273, 275, 277, 279, 285, 287, 289, 301, 307, 309, 311, 317, 319, 321, 327, 333, 335, 344, 346, 348, 350, 352, 354, 364, 366, 376, 378, 380, 382, 384, 386, 388, 390, 396, 408, 410, 416, 418, 426, 432, 434, 436, 438, 440, 442, 448, 459, 461, 463, 469, 471, 477, 483, 485, 491, 493, 495, 497, 503, 505, 507, 509, 511, 517, 519, 521, 523, 525, 531, 533, 535, 541, 543, 549, 555, 557, 559, 561, 563, 565, 573, 575, 577, 579, 581, 589, 591, 597, 599, 605, 607, 613, 615, 621, 627, 629, 631, 637, 643, 645, 647, 649, 651, 653, 655, 657, 668, 674, 680, 682, 688, 697, 703, 709, 711, 717, 719, 721, 727, 729, 731, 733, 739, 741, 743, 749, 751, 757, 759, 765, 767, 773, 775, 783, 785, 787, 793, 795, 797, 803, 805, 807, 809, 811, 821, 823, 825, 831, 833, 835, 837, 839, 841, 843, 849, 851, 853, 867, 869, 875, 877, 879, 881, 883, 895, 901, 903, 909, 911, 913, 919, 921, 927, 929, 931, 937, 943, 945, 951, 953, 955, 961, 963, 969, 971, 973, 975, 981, 983, 985, 987, 999, 1001, 1003, 1005, 1007, 1013, 1015, 1017, 1019, 1021, 1027, 1029, 1035, 1037, 1039, 1041, 1043, 1049, 1058, 1060, 1062, 1064, 1066, 1068, 1070, 1072, 1078, 1080, 1082, 1088, 1090, 1096, 1102, 1108, 1110, 1112, 1114, 1116, 1122, 1128, 1134, 1136, 1142, 1144, 1150, 1156, 1158, 1160, 1166, 1168, 1174, 1176, 1178, 1184, 1186, 1192, 1194, 1196, 1208, 1210, 1212, 1218, 1220, 1226, 1228, 1230, 1232, 1238, 1244, 1246, 1248, 1254, 1256, 1258, 1260, 1262, 1264, 1266, 1272, 1274, 1276, 1278, 1280, 1282, 1288, 1290, 1292, 1294, 1296, 1302, 1304, 1310, 1312, 1314, 1316, 1328, 1334, 1336, 1338, 1340, 1348, 1350, 1356, 1362, 1368, 1370, 1372, 1374, 1380, 1382, 1384, 1390, 1392, 1398, 1401, 1403, 1405, 1407, 1409, 1417, 1419, 1421, 1423, 1425, 1427, 1437, 1439, 1441, 1443, 1445, 1447, 1449, 1451, 1457, 1463, 1465, 1467, 1469, 1475, 1483, 1485, 1491, 1500, 1502, 1508, 1510, 1516, 1518, 1520, 1522, 1524, 1534, 1540, 1542, 1550, 1552, 1554, 1560, 1562, 1564, 1566, 1572, 1574, 1580, 1582, 1584, 1590, 1592, 1604, 1606, 1608, 1610, 1612, 1614, 1620, 1626, 1628, 1634, 1636, 1644, 1650, 1658, 1660, 1662, 1664, 1670, 1676, 1678, 1680, 1686, 1692, 1694, 1700, 1702, 1704, 1706, 1712, 1714, 1720, 1722, 1732, 1734, 1736, 1738, 1744, 1746, 1752, 1754, 1765, 1767, 1773, 1775, 1777, 1779, 1781, 1794, 1800, 1802, 1804, 1806, 1812, 1818, 1820, 1822, 1830, 1832, 1834, 1840, 1842, 1844, 1850, 1856, 1858, 1864, 1870, 1872, 1878, 1884, 1886, 1894, 1896, 1898, 1900, 1902, 1904, 1910, 1912, 1914, 1916, 1918, 1924, 1926, 1928, 1934, 1936, 1938, 1954, 1956, 1958, 1960, 1962, 1964, 1970, 1972, 1982, 1984, 1986, 2000, 2002, 2004, 2006, 2016, 2018, 2020, 2022, 2024, 2034, 2036, 2038, 2044, 2046, 2052, 2054, 2056, 2062, 2064, 2066, 2068, 2070, 2072, 2078, 2080, 2082, 2090, 2092, 2094, 2096, 2098, 2108, 2114, 2116, 2118, 2120, 2126, 2128, 2130, 2138, 2140, 2146, 2148, 2154, 2156, 2162, 2164, 2166, 2168, 2174, 2176, 2178, 2184, 2186, 2188, 2194, 2196, 2198, 2204, 2206, 2208, 2216, 2218, 2220, 2226, 2232, 2238, 2244, 2246, 2248, 2254, 2256, 2258, 2264, 2266, 2272, 2274, 2276, 2282, 2284, 2290, 2292, 2298, 2300, 2306, 2308, 2310, 2312, 2314, 2316, 2318, 2321, 2323, 2325, 2327, 2329, 2331, 2333, 2339, 2341, 2343, 2345, 2355, 2366, 2368, 2370, 2372, 2384, 2386, 2388, 2390, 2396, 2398, 2406, 2408, 2410, 2412, 2420, 2422, 2428, 2430, 2436, 2438, 2454, 2456, 2458, 2460, 2470, 2472, 2474, 2476, 2478, 2489, 2491, 2493, 2495, 2497, 2499, 2501, 2503, 2505, 2511, 2513, 2519, 2525, 2527, 2529, 2531, 2537, 2539, 2541, 2547, 2549, 2551, 2557, 2559, 2561, 2563, 2571, 2573, 2575, 2577, 2589, 2591, 2593, 2595, 2597, 2599, 2601, 2603, 2609, 2611, 2613, 2619, 2621, 2623, 2629, 2631, 2639, 2641, 2649, 2651, 2653, 2655, 2661, 2663, 2665, 2667, 2669, 2675, 2677, 2679, 2681, 2687, 2689, 2691, 2693, 2695, 2697, 2699, 2701, 2707, 2713, 2719, 2721, 2729, 2731, 2733, 2741, 2743, 2745, 2747, 2755, 2757, 2759, 2765, 2767, 2769, 2771, 2785, 2793, 2795, 2801, 2809, 2811, 2817, 2823, 2829, 2831, 2833, 2835, 2841, 2843, 2845, 2851, 2853, 2855, 2857, 2859, 2861, 2864, 2866, 2868, 2870, 2872, 2874, 2883, 2885, 2887, 2893, 2895, 2897, 2899, 2907, 2909, 2911, 2913, 2915, 2917, 2923, 2925, 2931, 2933, 2935, 2937, 2943, 2951, 2953, 2955, 2961, 2967, 2969, 2971, 2973, 2975, 2981, 2987, 2989, 2991, 2993, 2999, 3001, 3003, 3011, 3017, 3019, 3021, 3029, 3039, 3041, 3044, 3050, 3052, 3054, 3060, 3062, 3064, 3066, 3068, 3076, 3086, 3088, 3090, 3092, 3098, 3100, 3102, 3104, 3106, 3112, 3114, 3116, 3122, 3124, 3126, 3132, 3134, 3136, 3138, 3140, 3142, 3144, 3150, 3156, 3158, 3160, 3166, 3172, 3174, 3186, 3188, 3190, 3196, 3198, 3200, 3202, 3204, 3212, 3214, 3216, 3218, 3220, 3226, 3228, 3234, 3236, 3238, 3248, 3250, 3256, 3258, 3264, 3266, 3268, 3270, 3272, 3280, 3286, 3288, 3296, 3298, 3304, 3306, 3308, 3314, 3320, 3322, 3324, 3326, 3328, 3334, 3340, 3342, 3351, 3353, 3365, 3367, 3373, 3375, 3381, 3383, 3385, 3387, 3389, 3395, 3397, 3405, 3407, 3415, 3417, 3419, 3421, 3423, 3429, 3431, 3437, 3445, 3447, 3449, 3451, 3453, 3455, 3461, 3463, 3469, 3471, 3473, 3481, 3487, 3489, 3491, 3493, 3501, and 3503 shown in Tables 1-336, in an amount sufficient to elicit RNA interference; and
inhibiting expression of the CA gene in the cell.

53. The method of claim 52, wherein the double stranded RNA is provided by introducing a short interfering RNA (siRNA) into the cell by a method selected from the group consisting of transfection, electroporation, and microinjection.

54. The method of claim 52, wherein the double stranded RNA is provided by introducing a short interfering RNA (siRNA) into the cell by an expression vector.

The application's sequence listing, which the Patent Office published only in electronic form, follows.

SEQUENCE LISTING (3504 sequences)

SEQ ID NO: 1 - DNA, 20765 bp, Mus musculus
gcctggaattcctccttatgcaaatgaggcttgctcagtgctctggccaggccagagatttatgctcacctgaaagctcatacccacacccaatgctttatgtagtctttgttccctcattaaatgagctatttgactgaagttgtcttctaagagtttgttctcgctaggctcactgccacctgagggtctctttgctccccagtggtccaccttgcttcctctctcaggaccaacggttgcaattggggggcaatcacactgccattcagggcctagacagcactctgctggccacacaccagccccagtggctttccttagtcttggagggagactttaaagccagaacctatgtggctgaagctgccaagttctgttgctggctagggctggaacacggcccccttgttcaagtatattttcacctacctttatgccaaaatttggctgtcttgggacgtgctctgtagaccaggctggccttgaactcagaaatctgcttgcctctgtctccagagtgctggggttaaagctgtgcaccgctatgcgtggaactactgttccaagttccttagattccttttcatgaggtggactttaaacaagttaaagactgttatagactatagggacttttgaagttggactaaatgcattttgcattatgatatggctaatgtagtttgtatagtcatagaacaaatatatatatatatatatatatatatatatatatatatatatatatatatgtatatatataaactttcaagtagtttggaatggacaccagttggtaagttacagcaaagtggggggaaatctacaagtatcagatgttatattagctttgggattgatgaaagccaggtctgttaggtaatacatgccaaaaggtctcacgccagagtcacaaatatgtcccggcaaacatcccagagggcaatgaacagctaaagactgcacaagataatttggttctggagttaacaatattctaactcttcctaatgagttagctagccccgtggaatccttaatatacatttatgtatggagggaggggtcgcttcaggtcacaatgttacccacaaagggttaaaatatgaatatcagtgtgcatctgatgctcatgtgttgtaatcctaggaggagccatttttaagcccttcccccctttaagttcgggggattgaagccagggtcatatgggcgttgggcaagtgctagagcacttagtgagacgctatgtgagagggtcttatcagtatccctggggcttcccgggagcttcgggacagggttggtggctgctgcctctctcactgtacctgtattcaccttcttggtgtgggtaggctcttctctcttcagctggtatgtccctcattccaagggccccccttttcaatgacttggggtttgaggggagcagagagcttactctacattattgttatttttagttcacaatgcatgctgaaccatatttgtctatactgcccactcggccttttcctccccgttccctccctctagtctggtatctccctacatagttttacttctacttttatgtaatagatactgttggcatttcttcaccgttacctggcaacagccaggtgtgcctgactcacttgcccctcctctcttctcttgctctcttcccctttccccccctgtcccttctctccccattctcctcccctcctctctacacatgctcttgaccagcctctacttctctaccctctctctgtctttctgcctttcgctgtctctgctacctagtcaactcccctccccataccctgaataaacttctatactataccgtccctgtggctggtccctcagggggaagggatgcctcagcattggctcacagaggcacccgcttccccctgcaccataaagcgcctccaccaaacatatccctggcttctttttttaaataaaacacaacatacacacatgcgattttgtatatctatataaggtcaaggaactacatataagtaaagcccatgctatcttcctgagacagcctttattctcttagtatgagtatctctagtcacatccattttcctgcaagtgatacaacttcattattcttcatggctgaaaaaattcccattgtctttgcatgctgcgtcttcctatccatggtctctggatgatgtgggcaccactgatttgtgcaggagacacgtaagcttccatgttgtgttcatctgtcgagaacagcacttctcaatgcccctttcacaggctctgcccaagaccatcagaaaacacagatatttacactataattcataacagtagcaaaattacagttatgaagtagcaacgaaatcattttatggttggggggggggggtcaccacagcgtgaggtgtattaaagggttgtggcattaggaaggctaagaaccattgctgtagatggtttctcagagtgttttcctgaagcttttgcgatggctgggctgtctggaatgcgctttacacttctcactacttgtgagagagacctatctcctctctgaggccaggggcatcctgtcatctttgtctctgccaacaacccccacccaaatttctgtcctactgtatcttccctgttagacaccccgcccccagatcagggctcctcagagccttagctacctttccatcactgtgataaaaatgctcagacaaaagcaacggctttatcacggctcatagttctaggacaagtccatcaggacagagaaacgccgaagcaggaggcacggaagcaagagcagagggggaggggagtcacatcgcacctgatcccaggaagcagagtgaacctgaaccggaagtgcggctgctcagacccactctggtaagtggggctcctcctaaggataacgcaaccttccccaaagcaccacgtcctggaacatccctttgtcagacacggggtctatgggaggacatcttacaataaaggtacaatacttagcccatttcctatttagagcagcatccgctggccccagctctcctgggtcagacatcttactctggatgctttctgtgtattcactcctagactcgagacacttcttttttgtttttgtttttgagccctggttatcctgtaacttgttgacttgctgtgtagatctggctggccttcccagtgctaggattaaaggagcgcacaccatcacactcagcctgagacacttctgaaggcacctggagcagagacagctgcctaagccttctgtgtccccgcccccttgcccccatttctccaccttaacgcttttgctttgtttctcttctgtgccaccacaatgacttcaagcctattgccttaccccaacccccaggccgagctatgctctatctctggtatagatttctaattaaaataaaaccaccttacttatttttattttatatgtatgagtattttacctacgtgtatgtttatataccacgagcatatccggtactgttagaggccaatagagggcagcagatcctcagaaccggggttaccgctggttctaagccactgtgtgggtactagaaaccaaattgccagaagagtaagcactcttcttgttatggggattttggtgtccattcctggggtcaggtggtacaggaaaagttggattcccctcttggagtttttagtatcattaataaaataacttaggaatggattaaaatggaagctcaaaaacagttttattaaaggtttttaaggagcctcaaaatctaaggcaggctagcggtaaaattcagcagctgcttggaggaggtgaatggaggcaataatctttttttaaaaaaagttttattgaagttcctgtggagggggagggggaggaggaagaggaagaagaagaggaagaagaagaaaagaggaggaggaaggggaggaagaaggggaggaggggggaaagggagggggaggggaagggaggggaaagaggaggaggaagagggggaaaagaagaagaaaagaagaagaagaagaaaagaagaagaaagaagacgacgaagaagaagacaaagaagaagaagatgaagaagaagatgaccacgacgacaaagaagtacagtatctcactaaaggactggttattccaccttctgcttatcagaatggctgaaggtgttcctcacggtggtctctgggccagatgcttgaaccagcccagcaggaatggtaggtctgcatccaggccagagactgtattctcttgtccaggagtttttcccctgtaacataaactgctgatctatctttctagcaccaagattcctaattttgtcagtcatcaaagaccacatgcctgggacctcctgaagggaacttaattaatgtttgtgaagaaccagggcctccttgtgaaaaggtgctgtgtataggaaatattcttttaaacaccaattgtctggcccctctagaggccctgtaattaagcaactgttgtggttcctgagtggctaagactttaacatttaactatattgtaattaagccaggccttctggaagttggtgccccgctttgcagcaaggaagagaattttgccaagcatctctttgcaaaaacacgctcaggttccgggcaccttgccaattgcttttcccataatctgagtgtggttaccatctccctctgtgcaatttcttttgaggtgaatggaaatgtcttccgtttcttagactcctctggtatataattggtcaaccatccatacccatcgggaagaggtttgactggaacactctctgtgtatccctggggccagaaggagagacaaggggatgtgggcacgtgactggtctttgattaatgggatgtggacagacccaggggtacatcttcaggcctaggtagacattctttttggctctagagttcatccacattccagaagacccccaaggacgcttttaatgacattcctccccccaccaacactcccctcccccaaaccaaactaaaccaaaaccagtcagtaagctggccaaggcttcaagaaactgaaggtccgtggaattccagaaagcagccaaccccaccataggctcttgagtccgaaggtccccaaaacaagcactccaacttccctcccacccagagcttagagcatacagtttaccggaaaggtattttctgtgctcagcatatacaagctcatccccctctcccccacccgtaacgcccctaccctgccaccaatccaaccaaaccaaaaaaccttaagagttcacctcggtgccgggcagtggtggcacatgcctttaattccaggacttgggaggcagagacagttggatttctgagttcgaggccagcctggtctacagggtgagttccaggacagccagagctacacagagaaatcctgtcttgaaaaaccaaaaaaaaaaaaaaaaaaaaaaaaaaaaccccaaccaaccaaccaaccaaacaaacaaaaaaccaaccaaccaaaaacaacaacaaaaaaacaaaaaaagagttcacctcgttctcctgtaccctcggacaggaactgcagtgtttagggatttcaacctctttgaattattaaagtttgtcttgggctggagagatagttcagcggttaagagcactgactgctcttctgaaggtcctgagttctaatcccagcaatcacatggtggctcacaaccatctgtaatgagatctgacgccctcttctggtgcatctaaagacagctacagtgtacttacatagaataataaataaatcttaaaaaaaaagtttgtcacgtgggtttgagatcgaattgagtctatttgatttccttcctctgacttaacttcatacactcgtgaaggtagtggcactagaaaatgccagggaggggaggtggggtgggtcggcggggtagcggctgagatcctgaaaccccaggaaaacccgaaaagcagagttctttgctgagttttgcatgaatacaaagtcagattattataattattgtcatcatcattttataattattattaatctttgtgtgtatggcttgtgtttgtgcctgtgagtgtggacagaagacagtgtggcatgctggtatttacattctaccttgtttgagggagagttccccccacatgtgtctgagtgtgtgtgtgtgtatctctgtctgtctgtctgtctgtctgtaccaaagactgcaagtggaggtcagaggatgtgtttgtggagtgggagtctgttctctctgtctgcctttattacacgggtttctgggatccagtgtaggctttgctcagcaagcccttttacctgctgtgctatgctactggccatttttctgggtctctggctagctactgcatctaccaggctagctggttcaccaggctctggagaggctcctgtctgcctaccttttcatggtattcacagggaaaatagtaccactgtgtccagctctctataggctctggggatttgagcccaggtctccacgtttatgtggctttatcccagcacagaaagtcagctctttttccttctaaagctacgcattccaattcttcaattagtgcaagctgattcatctgaagaaggagcaagacaattttctcatctgcagagtggatagaatgatgggatttccaaattgcctcgctaggctgtgggaaagacacgcaaggggccagctagatagctcagcagataaaaatgcttgtcacacaaggctgatgacttcatgatccccagaatctgtggtggaggagagaactaattccccagagtcgtcgtttggccttcacatgtgtactgtggtacaggcatactccactctcacacacagcatatgcacacacacaatagtaataaacataaaaattttaaataagaaaaggcagacaaaactgggaaatagtttgaaatgggatcaaacgtcttcccagaaatgactgctactgtctcagaagtgatgctcacactagcccccacccagtgattcaccaattgctccaacataggtctgtacccacccactaccctagtccactccctgcatttgacatactgcagcaaggttgacagcttcctggtactcatacactcagagaaccttctgtgccctttgcagacatcactaattcggtatagagtatgtttagtctgaactgagaggcagcctcagaatctttctcagtatattgtttgatgctctcatctaccctcagtggcctaaaacctaggggtgacatattttccttgtgtttaagttggctgcttaaagctaaccagcacttttgatcttcctgtctgttgtggggcctgcagagatgaatctgaggcctcatgttgtggtagatggccatattgatgcccatggtctctcctgctactggagatcatgccgaggtccggggatcatgccgaggtccgaggatcgtgccgaggtccgtggcaagtgctaacaccggagactatgtggatgtctctgtgctgttcccagggaccacaaagaagtccatgatccacactctcactgactgtaaagggcaaggaagctacttttgcattggcatcaatgactgcagactcacagttgagaaaggacatagagggctttagtgacaacccttacctattcccaaccaccctaagaagtaacagcctcaacaggaaaccattgaggagaactattaaaaactgtgacaaggatgctgaagtgtagctcttcacaactgatggcttctggcaggggtgtgggaggggaaagactcagttttctttctggggctgcctactgagagtttgaccatgctccagggagtctaatacaaattggactgtgtgtttgtgtgtgtgtgcatgcatgcatgcgtgcgtgtgtgcatgtgtgttcacgtgcgtgtgtgttgggtggggttgcagggtggggcagacccgggaggactaggaaatgagtgtgattgaggtgcatgatgtgatgtgaggtttctgaataatcaatacaaatactattggtaaaaaaaaaaaaataagtcatcggggacctcacttctgcccttctcttcctttttaccctttgggccaggccatagggggcacctttgtacataataaactatctcttttcctctaactaccctcatgtttctatagaactcattgtaatgaggcacaggaacctggaaacggcaatgtctattgtgatggtttgtatgtgctcagcccagggagtgacactattagaaggtgtggacctgtggaagtaggtgtgtcactgtgggttttaagaccctcatcctagctgcctgaaagccagtattctgctagcagacttcagatgaagacgtagaactctgaactcctcctgcactatgcctgcctggatgctaccctgtttctgccttgatgatagtggactgaacctctgaatttgtaagtcagccccaatgaaatgttgtccttataagagttgccttggccaggcatggtggcgcacgcctttaatcccagcactcgggaggcagaggcaggaggatttctgagttcgaggccagcctggtctacagagtgagttccgggacagccagggctacacatagaaaccttgtctcaaaaaaaacaaccaaccaataaacaaacaaacaaacaaataaaataaaataaaaaagagttgccttggtcatagtgtctgttcacagcagtaaaaccctaactaagacttctactctctaaactcttatctgttcttgtaacctcacatggtccagactatcctcaaaccaggttgaggcctggaacttctgatcctctcccttctacccctcgagtgctgggattcctggcactcattaccatggatggtttatgtggtgctggggttggagctctgcacacgctgggtcagtaccagcattgtctgattgtctccagaggtgagagctctgtgctgtgatcagacgctacagagacggatacaggcttccatcttctcgggcctttggctttttctatcactcagatcttgttgtgcacggcaacactaacactgccctgctaagccaggcccaggcccttggcagtgggggtaagggtgaggtggtgaatgaactgaagctcggtgcagccagcctgtaggataattgcagggttgtgactgggatgcgactaaggtctctctggggagtgtgacgtgtttggttttgtacttgacatcagtgagaagggggttccctggaaacctggacctactcaggttctgaaaccagcccagcaggaaggaagatattccaaagagatactctgcccctctctttggctatcagactactgagacacaggctcccggaaattggagttttcccaggcatctcctgctgggggcataacactgggatcttggtgccagccagtgcggtcgggtggggttgagggtcacttgtttcctggaaagagtattcacactgttccaacagcttattagacctccttgcaagacagactggaactgagatattggtgggtggcaggcacctcaccttgattggactgcttagttatacatcgccgtgtgctctccctgctgaacctgaactatatgtcaaaacctaaagttgagctctaggtgtggaggaggggcatagctgggtatcgtttttcttctcagtgtggccatagtcatcaaacaaatccttttctactgatcactgtcaattttgacagaccgaggaaaagttaccaagcttagcttgtccaggcctccagggcctaggttctgagccccagcaactctcccaaagttccccaaaggctggttgggagcagcaggaagtgttctttggaacaagcaagacaaagaatgttacttaattgttttctttctttcctcttttgatttgaaaggcggtcctctccttgtggggactggagaatgccaccgagaggaggatgtggggtaagccctggtctgaggtgaccatggaagaacagagcctggaactcccgggagctgacctttcccaccgtgctgcaggctctgctggagaccaccgtgggaacaggctgctggtgagctggggagaggcagccattgtcctgtgtccctcccactccgtaaatcctgccagagcctgacatgctgtatagaagggattgatggagactcggactcgtccctgctctggggcattggcctgaggtttcccccacttccctggagccagagggagcctctgaaactgtctcttgctaaaataccattcttgaccccaggagtaaggagagcctggttcaccctccaaggtgacatggaaagccaggggtggcagaggcgagagattggccaggcgatggcagttgtaaataagccttttgggaggtcaggggatggagaatgactctcagtgggtaagggcctccttttcagacgggcttaaacctctgctgcctcatggtttgtttccaggctgcgctgctgcagtttggaccagaatttcccagattctcagaagatggctactggaatattgaaaatgttctctcacacacacactctccactggcagagatttgtagtgaacaggcctatcctgttcatggatcgggtaaaactaggaacctgctttccagatcggatgtccctcaccagactgacagacgtggactagtggcttctttttcacctctttctaattggatcacccggggaactgtgcacgcgcagatgtagcatactgtccgtgaaaacctgggtagctaggagagggtgtattatctatgcatcttgtttgcaaacactggggctcacttcctagcaggagttctacatatacaaatcctcagaaataaacaagactcagggttgaaccctgggccaatgatggacaaaccagtgcctctggcctctctgtgatttaatctcacattgcccttggctatgtcatgagcagtggcccttgacatgagaggctgattcttggtgtcccacctcttccaagtctcatgacaatggtctagctggactcctacacgatcatatagaccttgctatcaggctctgggacctgccaccatccttgccatggggctatagatgtatctcaccacacctagctttttcttgggttctagagacttgaactcaggattacaagcttgcatgacagccacctccctcacttagccatctccctagcttttatgtgtgctttgagacaaggtctctttttggctggacagtggtccctaaatggtccttctcctacacctgccttcctaacaatgaaagtacaactttgtctcaccatgcccgacttgtttggttcccctaaacgttggttctgagaatcaaactcaggtccttatgcatgtgtgcagcaagtgcttcatccgctgacctatttccccaacctccccttaccctgtggggttctgaggcaggcaacctgctcaggagttctatctgcctgatacccacagacttttgggcacaagaacccagtggagcactgactacgtccctggactgtgtgtccttactgccacctagggctgctgccctacttctgagctgggatagacctggtcagtgtccagcaaatgctctctgatcttacttctctgtggccatccttctgtccctctgtcttaactgcctgcttggtccacaaagcccattcatctagccaaggaatgataagtcctgtctttgggttgtgaatacctgtgaggttgatagattataccaggctttaaggatcctgaaagaccctaaggtgttttccagtcccacaccctccttacaggttgcccctccctcctggggtcaaggctaggccaaattccatcctccacccataggaccattcttaagtaaaaaattcttggaatgtactgactgatagtcacctgaccctctgaaaagtcccaggtagagttcaaatgcatgccatgctttatagccaatagatttaaaggttaatatgcttagtcattacgtttgaactgtaaccttgctgatataacctgtgcccctgaaaagtataaaaactgcttgtaacagccattcgggggtcaccttctcatcactcgccttgagggactgattgagagttgaccccagtgcgccagaaaataaacctcttgctttcgcatcgatctgcatctaggtgtctcacttgggggcgtcttgaagtaagtgccactgaccaagggttgggggtcttacaatccaagcaaggaagcaaaacaggaaggcatgccaccgagtatgttggctatggggacatgaaagagcagcaggtcctgggggacccatgtctgagtgatgtgcacactgcagggtcccaggcaggtatgaggctgaggttcatgtagctatgaacaggttacagcccttgacactcctgacctgcgtcctcccaagggccacctctgagattccatccccctcccactctgtggggctcatgcttataggtgtcatggatttagaggtcacccaaggctctgggtgggacactgggacaggacctcatcataccctgcttggtgtcccaggtcccctgatggtgggccggagaatttggaagaggagagcaaagtttccctggagttgcagctagggctgggtgtcccggggcctcatggaacaaagcccacagggttggttagttttttttttttttgtttgtttttgtttttttttttttttgtctacttgacacaaactggagtcatttggaaagaggaaggcttagttaagaaagtgcctccatgagattgtcatgtaagcaagtctgtggtgcattttcttgatagatgattgatgtgggagggcccagcctactctgggtggcatcacccctgggtgatcagtcttgggtataagaaagatagcgaaccaagggtctgagagaaagccagagtaggtatctctctgtgattcttgcctctgctcctcttgagttcatgccctgatttctattaatgatggactgtggtcaggatgtgaaaggcagataaaccctttcctctccagttgcttttagtcacggtattcacaccatagcaatagaaagtaaactgcctgtctttcttatagccatctgtcctccttggatgcagggctgggactgttgtgtgtgattttctttgttccctgtctcatctccagctcaagtaggtagtggcaggacagctgacatgcatgagttaggcaaatgtgcaactggaagaggggccgagtgcattatagtacttgctcagtgtttggctttctcatctgttcaggatggctctgctccgagatgaggagggtgcagcatcactatgggatcagcagaggcagtctgagaaccggctgaggtgattcaacccatccaggagctgtgaatacttgtgattgccttggctttagtggtagcaaaagaggagttttaatatacacactgtaagagttttgaactgttctaggcactgttggtgagggcagccaggctgtggcttcatcaggtctcagaggtccaggaatggcctctcttctcagagatcaagttggatgttcagagaggtctcagtattgcaactgtgccttgggcccctgtgggggtggcaggcagatgtatttcacatccctcagggcatcctgggactagctaatattgtaagaagggacatgccagactcctgtagttcaagaatggaaggacctggtactgactccctggaggctctaagagtagaccccatcattaccccacactcgagcagagggccagaagagagaaggaggcaccttaggagttgtaggtgtgggccaggcgaactctacttttgtggtactatgtctgttgtgtgcctacaatgtcatttcatctctgcaggctgcctggcaggaaagagggcatctgtcactcatgaacagtatggtcagcgtgaggtaggggaactgagtgtctggctaggtataggtaggagaaatatgtggctgagggacatggaaggctggattacagttcaagtcagattatccaaccaaacaacttttcattacagttatttgtgtgtgcgtgtgtgtgcatctgtgtgtgcgtgtgtgcatgtgtgtgtgtgtgtgttacaagcattagtaccagtgttatcagtcagaagaaaatttgcaggagttgatttttctccatttgggttttagggattgaatttaggttgtcaggcttggcaacaaatgtttttaccaactgagccatttagctgggcccagctcattaatctttaaaatatttctatttgcacatattaattgtccactgtagttaagttccgttgtaagattttcatactttgccatgcatatcatgtactttgatcgcctgcttgtcactcccatgggtcctctgtccttctcagcaaggaccactctgactttcatgcctttctttctctttgggtgagcctaagagttcagccaggtgcgtgggacactcattgttagctatgccaccgaagggaatgtctctcccttcttcagctatcattaactatttctagatcttcagggaggttcagagcctcctgagacatcacttcctccatgatgggcccacaccacttctgcattttttgtttttgtttttgttttttgagacagggtttctctgtatagccctggctgtcctagaactcactttgtagaccaggctggccttgaactcagaaatccgacagcctctgcctcctgagtgctgggattaaaggtgttcaccaccgcctggctctgcatttttaaaatctgaaacactggttggttctcttttctggatagatttttcttgtgggtgcactagcccttcagctcttcctcttacgtcatggagtggaaagcctcataccgagccctggtacccagctccaagcccagcagatgctgcaggccaggaaggcccatttatcagcctcaactacacatggtccatcctgaggcatctggagttaaaacagatggttgtatgtggatggcatttacttactgcctgtcaatatttgataagtcttattactttgcagtgttgggttttaaaataaattaaatggctaatggaaatattaaaatagaattaatttaactaaacaaataaaaactgggagaggcgatgtgatttgtttagaagttactaaatatattttcggaggaagcctcagaagggagatggggtggtgcctgggagggctaagctacccaggtgtcagtgggccctttggggcctgggggtaggccggtatggaagactgcttcagtgggcaactccaccagtgctgacactggaaaccagagacttacaggaggctgcttccagggacccagacccttcttcgtcatctctatttaacacttaatgtctggctgatgattcaagtttcagagcaaagccagtattgcactcaccctcggcctgcctgtacatcagaaagggaagcagagaagttgacaggtgacacacaagacattttcaaacaatgtagtggcacagaggtgctccaaatatgtttggaggatgatcttttcttttaacaagtgttgacttggcatccattttaatcatagggaggaatagaagatctattctttgtacagtggcacaaatctgtcttgtgcctccactttttgccaggagcccattaagaaaaagtcttttcttggggcaaagcatggcctctttaggagggttttctgctgtagtcgaggatactctccgggtcagaaccctgctgcttgtgctcagagtcaggcacacaagtgcaagttgtgttctgaccatcacgctggtattattgcatctctgtctgtctgtctgtctctctgtcacacacacacacacacacacacgcacacacacacacacacacacgcacacacacacacacacacacgcacgcacacactgaaaagtttggttagataagcttgagctataatgcttgccgttgtctagccacctgctcaccaagcggcctccagtgtctcttagccacataccatccctctcctacctacgccgatcctaacacccagctcccctcactctcacgacccctactctttatgagtgacagataccctctttcctttcactcctgcttcttggctctagagatggggaagagtggagagagaaatgattgttcagcaggcaaggtagaaaaggattcacagagcagatcgtttcttactcctgcttcaccaggcaagaccttgtaagccacaccctctttggtttgaagcagacatggtggagaacttccatggttctagtatgttccccacatttctagtatgtttttgtatgtcccccacatttctagtatgttctggtatgtcccccacatttctaggatgttccaatatgtcccccacatttctaggatgttccaatatgtcccccagatttcttgtgttgaagacttaatctcaaatcatcatgatatttgagaatgaggtctttgggattagacagatcactcctagactaacacattaatggcctgtccagagagtggcttcattaatataagctacactctctcctagcttaccttgtgttgccccaggagtctgcaaagttcccaccaacaataaggacaaaacctgaaagagccctggaccttgcacttccagaactatgagctaaagaaacctttattctttataaatcacccagcctgaggcactctattatagcaacagaagataggctaaggcagggagccaagggagaatctgccatgcaaggatgtggtggaattctgtctctcagaggtaagaagatgtgatatggagagccccacctttccaggagcctagaccaggaactgagagctgacaggaggggctctcacgggtgcttctagaatcctgacctggtcatcattggacatccagtctgcacccatggctagtgggaagtggagtgtgggtgtatgtgaagcattttggaatggttctgactgggatgctagccagaggcagtgggaagcctgggctatagagggaagcagctcagacaattccctagatggaagcaggttgacactagagagaaggcagggcttaggaagaggtctggacttctgcctctcaggtcaagtgcatgatgagccaagaggcctgtgccagacctcagttggcccccagtccttgaatatcatattgtaacaaagaggaacgtggtagcatgtgatgttcccacagtcaacttttaacagtcccagaaccccaatttcccagcacctgtggcctaacaaatagctgtaggggtttcttcagaaaactggtgtgtgtgcacatgtgtgtgcgtatgtatgtatatggttgtgtgtatatgtgtatgcatatgtgtgtatatatgtgtgagtgtatatgtgtatgcatatttgtgtgtgtgcatgtgagtgtgtatgcatgtatatggttgtgtatatgtgtatgcatatgtgtgtatgtatgtgtgagtgtatatgtgtatgcatatttgtgtgtgtgtgcatgtgagtgtgtatgcatgtgtacacatgcacatacatgtgcaggtgttctaaaccatatgcagaggctactcacaggaaaatccaagatctaagtgactttgcttctgagagggcccctggctacacttggtgctgcactctctggagagatgtgaccacatggtgaaaggtggacacacttctctgtgattcatttacaagaccacctgatgccagtcaggagccaggagtcctcatgacctcttgaagaccccaccccttagccacattacacaaaccagaattgtgaaaagagcagtcactaaaggaccttcgactagtccattaaggaggtccacctatgtgtgcattaaggaggccctagcctgcctttctcagctctggggattttacatcctgtgactcaaagcagctctctgccaatcgggtgctaccaccagctgctatctggtgccagctgctcattatgcgcatgcacacctgcatctgacactgccacctgcctttgctctgtgggctctagccccctatcctccaggagtgctgtccctgtcagtcccacctgctgctgcttggggccccggaggcagctcaccatctgctccttctccccagcagaagagatttccaagtctcctggggagtgtgggtgcctgaacagtttccttcctacgcagaccatccatgggaacaggcaattgctcttgtagtgtccgggggaatgccttgcaaatacccaggagcagtgtgcatgcgtcatgtaaggtacagcagaggtgtgaaccagggtccttgcgggatgctaataccctccctcactggttcttccttgcccaatgtctctacccttcatgcagcatcctaaccttcagctgtgtccccgctcttgctcctgttgggatatgggctggtcctgcagttcttgggggatttggtgaagtaacagctatctctttttcctctctgtattcattactttctgttgtcacactgcccagagcaaacttagagaaaaaaaggtttatctgagtcacgcttccatgttgtagtctattattgagggaagtcaggacaggaagtcaagcaggaagtcaagacaggaatggtagcagagatcacggggaagtgttgctcactgctttgctctccatggcttactcagcttgctttcttttacaacctaggaccaccatgtactgcctgtgtggaccaggtcctcccatattagtcattggtcatcagaatgctccacaggcatgcccacaggccaagggggtagaggcagttcctcagttaaggttcccacctcccaggggtactctagcttgtaagagattgacaaaagctaaggctcacccaagcctggccttttctaccaggttgtccctggtgtgatgctggctcttggtaagttacaggaaggaaacattctcccagcaatgacctcgtctcctacagcacttgttcatttaaccaaccgagagttttcatgagggcaggggcatccgcttctaagggagctagattgctctagtctcctagcaggtttgggtatctgagagttgtgcccggtgtgtctacatcctgagtcccattctcactgagggggagctcctggaaccatgtgcagataagctgtctagcctgacatcttccccagccccattctcctggacttacccatcccattccagttaaccattgactccagcaagcatcagttccctagttctcaagacactcctgccgtggggatcagggatgctgtactgttcttacagtatcatatgtgtcttattagggtttctattgctgtgatgaaataccacaaccaaacaacatggggagaatagggtttatccaatctacacatcacagttcatcatcaaaggaagccagaacagaaacttaaacagggtaggaacttagaggcaggagctgatgcagaggtcatggagtggtgctgcttactggcttgttccccatggcttgctcagcctgctttttaaatagcacccagggccatcagctcagggatgaaactactcaccatgcgacacaggctcttgtcttagttaaggtttcattgctgtgtggtcaggttcatactatggccacagcaactcttataaaggaaaacatttagttggggctggcttcgagtttcagaggttcaggccattatcgtcatggtgggaagcatggcagcttgcaggcaggcatggtgctggaagagcagagagttctacatcttgatctgaagtcaagcaggaggagtgttttacactgggcaggatttgagcatatatattaccccagagcttcccaccaccacccaccaccacagtgacacacttcctccttcaaagtcacacaataagtccacacctcctagtagtgccacacttcatggtccaagcattcaaacacatgagtctatggggccatacctatgcagccctccccgatcaatcactaattaagaaaatgccctgcaggcttgcctgcagccctgtctcatggaggcattttcctaattgagatttccttctctcagatgactttagcttgtgtcaagttgacataaaactatcgagcaaatcctgtaaggctctggtccctgcttaccccagaatgatttgccttgactctaatactatgctcagggctctctgtctccctcctaccagggttctgccaagggcgtcagctccagaagtcccctttagagccaactttccaccactgctcctaaagctagttgtctgaagtggtcttcccccgaagcaggttctgaatacaagttttgcatgctgagtggctttgacagcatcttttggcattccagaatggggatggtctcagagcttacttgcatggggtgacaggcttggtctttggaacccatacaaagcagctattggcctacagactggccctggaagagggttaaaggaacttgggggctgcagctgtgggcaagtgaggtagaactgagccatcttccctggagcagctggcaagtttatgcccagaaggagagtgtcctgccttgccagccaccagaagtgggatagcagaacacttccatgagggtgtcttgctgccctgggtgagtctgacatggcatgggaggtatctgtgacccaggaaaaatgggtccaggtggtggcatggcacgggagccaacatcctggttaga

SEQ ID NO: 2 - DNA, 368 bp, Mus musculus
atggaagaacagagcctggaactcccgggagctgacctttcccaccgtgctgcaggctctgctggagaccaccgtgggaacaggctgctggctgcgctgctgcagtttggaccagaatttcccagattctcagaagatggctactggaatattgaaaatgttctctcacacacacactctccactggcagagatttgtagtgaacaggcctatcctgttcatggatcgggtaaaactaggaacctgctttccagatcggatgtccctcaccagactgacagacgtggactagtggcttctttttcacctctttctaattggatcacccggggaactgtgcacgcgcagatgtagcatactgtccgtga

SEQ ID NO: 3 - protein, 117 aa, Mus musculus
MEEQSLELPGADLSHRAAGSAGDHRGNRLLAALLQFGPEFPRFSEDGYWNIENVLSHTHSPLAEICSEQAYPVHGSGKTRNLLSRSDVPHQTDRRGLVASFSPLSNWITRGTVHAQM

SEQ ID NO: 4 - DNA, 58226 bp, Mus musculus
  misc_feature (1)...(58226): n = A, C, G or T/U
tctccctgcccaggaggagccttgtcctgtgtactctgacttctaaatggcccttaaactggccccaggctgccatctcagccctcctgccttagtccctggtagcctgagtttcatggttgaagattatctgttcagaacaagaagacacagagagactcctgattcctttttaaatccttttattattattattattattattattattattattattattattattatgagtaactgagggtgggaatcgtgcagatcctgaagaggtagttccttccacagagaagctgaagtatacccttcatcctgccacaccacagaatgtcaagtgtggctcccttgctctccatcggaacacagattgaagctctgtggaggctcccgtctgtggtgctgaagggccatggccccagtgcccctgagctcctgcgcagtcgcagtcctggtagatggatttctgtgctgcatgctacagagagcctgttttctcccagatttgaaaggacgttggggatagtgcctaggaagggtccttcctggatttggggtgctgtcagggtatggtgtcagggttaatgcaccccagaagggagtcggccagagggccaaggtttgtgagcaggcagcagggagacgaggcactagtctgtgagagatcagagaaatgatggcggagattctacaggaagcaggacatgagtttgtggagactgctaggaagaatgaactgggctgctgttctcactccgaggaggccggctggacctgcaaccggctgcaatttacagaaaagtgtagccacatagtgagctttccattgttctgcaaaagtaaaattatgagagttggatatcctaatccccaaatccaatgtccaggatgctccagaatctgcaagttttttgagcaccataatgcaatgggaagaaaatcccacaatgcctagagagcacggtggctcctgcatggaattccagcgtttcggagggagaggcaggaggatgagaaactcaaggttattctagactacatagcaagtttgaggccagctgcaggaaattctccgaaaacaaacaaacaaccctcccccaaaagggaagagagagatcagaaagaaaaattgtatacctgacctcacgtgttgggttgcagcccaggtattttataaaataccatcaagctctgtagataagatgtatataaacaagtgattttcacagcatggatcatatcctctttctgaggctatcatggatgcttcttcctaatttaacttacacctttaaactgcacttcagccttgccctgtatagactagtgtagaagtcagcgttgcttttatttcctcagaggaaggaatgagatgtgagagagccattccccagctttacgagtgcatggctcgggctgagcccagagcgttcccttctctgtactcaccacccctagggctggaagcttctaggccttgtagacttcagctttcaggctcttccaggtctgctgacctagcctagcttctgcctctgaggctgacagctgaataagctcaccctttctgcctccttctgaactctggctggctggctccattcagctgttctgcttaaacgcctctccaagctgactgactaaaaccagcttctctcagcttctcactgaattgttctgctcagaaagactgcctcatgaactgaactagtccaaactgaactgaaccgaaccaaaccaaacttctctctctccctctgctcttaaagtagcctctctttcctgtctgttcttgtgagagttggtggatcctctccctgactcattctgtcagatctttctctgattcatcacttggtctatccctcaattagatgttactgcttgggattaaaggtgtgtctgcattccagtcagagggattaaaggtgtgtggtgcgtctgcattccagcaggatcacacagacctaggatcttggatgtgatctcttgccagagcagccacgttgctggattaaaattcctctaaagaatgggtttggaagagatgaaatatgaatctacttgttttgagaataaaaatgaggggatgggtatatggctcagtcggtaagggaggcaaaggcaggcggatttctgagttcgaggccagcctggtctacaaagtgacttccaggacagccagggctatacagagaaaccctgtctcgaaaaaaaaaaaaaaaaaaaaaccaaaaacaaacaaacaacaaccaaaaaaggattgctgtacaaacaggaggcctgatttctgatcctcagcactcactgtgaaagtggatacattgtaatcccagcacgggggaggcagagacaggcagatgcctggggctcagtggccaaccagtctagccaaatcaatgagctcaaacttcagtgaaagaccttgtctaaagaatgaagtggagagagattggagttagacctaagacatcgattgctggccttcacatgcacacaggtacacccatagccacctttccacatatacatacccacacaaaaccacaaatatgtacagcatgtccctatacagaaagagaaagtttaagacttaaaaccttcacattctgttcagttcgaccaggtaaaatatgggagaaagaaataggaattccattgttacaactgtaccagattacatgcactttttattccaataggatagtggacatataatttgcatatcccagaacaaggttgtggatgatcaccagtatttaattccagaacattttcatagcccaccaaaatcgtcatgtatccattgctagccttctgtaagcatgtattagaggttacccgtgaagctgtaaggacatcatggaaagtcaacaactcccaattcagtcatttatgcaacaatcaaaccttagatctacttatactttttacttcttcttgagtcgtatttttggtagtttgtgtctgtttcattgttatctagggtttttttgttttttgtttttgacgcattaggtgttgacctaatcatattaatttctgtagtgttggtaatgatgacttctttctcattcttgatttttttttaacattttgaatttcctatactttctttggtggcacatttagctatagatttgttaattttttttcaaagaacttcctactagattgttttgttagttttttctctactccttttctattttaagtttcattaatttcttttctgcacttcagtattttcctcctgcttgcttgcagcataacctcttctgcctctatatattttctatctctatttttaagttgaaagctactgatccaggatttttttccccctttgagcatttacagccacaaacctcttcctaagaatggttttagctacatctcatgtgtttttggtatattgaggcattgttttgattaatctcaaagtgttttctaatttcacttaggactttttgtttgacctgttgatttttttttctaagatgcggtttagtttgcacagttcccttctgttctttttctaatgaaattctgttgtggttggggaaatctttgctacttaaatatttttaaagttttgggtttttatggcctagcagatggtctaccctgaaatattcttgttcccttgagcaggacctggcttctgtgttagctgggttcttaggtccttgatcccaggtaccagtgcctcgtcatgtgttctgcttcttgtgcttcttatgttttgttttgttctattgattacggaagtgcgatattagcattttcagcgatggctgccggatcatcgatttctctcttcaattctgtcacttttgctctatgtagcttgagtgctattagtatgctccaattgagagaacttgattggcccctcaccatgatgcaccatgagataaagtctctcactttatttctggtaacttttgtcttgaatgatatctcatactgtagtagcatggctgctctagccggggtttgattgtcagtttctgggtcgttgtcttcctttctatttcagttttaatgtctttgatcctagttcacaactcttcagagtgttagttagtttgtgttattttttctgtcaacttctatattttaattggagtacttatcatttcattgtaactatgaagatagcatttacagaatgccatttatcttttgggttccgagcatcttacccctgttttgccttttcctgcattgctgctttctgctatgctacccctttcatttctttgtcatttcttctatggtgtttagtgtattttcttagcagtttccacccgtggggctgggggtcagtgtacatctttaatttataacagtctcatttggattaataccagtataatttccaaagcttgcaaagatctctgctcttgtataggcttgttctcccttcgttttctgcactattgttatacaaactgtatctttatacactaggtgtgcattggtgtgagtttgcagtttatagatttacataatcgtctttcaagttaagggaaaaatgcaaatggaattgcaattatatttcctctttaattatctgtataattacttttctttgccctgttctttcccgtgtgggtttgaataactaacacccattgtttcccataacccgatgatctagtaataatctttctatggtttgtgtttacctgggaatcttaatttttctttcatttttaaattatcaaaaaaaatcatataacaaattattagccattttacagtgaccacttcagtagcatgtagtatagttacagcatggtgagtgcttacctcaacacaccacctacaaggaaatttctgaggagcttggttttggaaactcatttgggtgggtttagtgttctttcagcctgtgtacatttcatgcctcctgacctctgtgactttgctggagttactaaggaccccttgcatgaggtgtgttgcctctcctctatgatatcttcatctctcacttcgaaagtctcgtgggtctaggtatgtgtgtctgtgttaccctacttgtggttcattggctttcttgggcgtgtagatcatttaccttaaaacttggaagtattcagctccgaattcttcagctcttctttctgcacctttgggtctcctcttgagcttctcatgtgcacacactggacttcttgtgtgcatgcgttggatacttaatggtgttccacatgcctttgagtctttgctcatttttcccactatcttttctgatcctgagattggttagtattatttcacatggctcgacaagttcttccacctgagggttcacccttactattgaactcctttagtgacgttgacatttcagaggccaggcatggtggcacagttttataatcccagctcttaggaggcaggaatatcaggagttcaaggttacccttggctacttctggggttgtctcttatcaaaatcgtatgaaatgagagaagttgagcagttatttttatctggttggtctataggcatgtctgtgagagatcatcttgattggtaatccatgggtctctgggatgtgtgcatcagcagaggacagcttgttgaaagtggttctttctgtctaccatgtgggtttttgggataaaattttggtcatcaggcttggaggcatctgctttcctcactgagacaccttacctgttatactttgtatatatttttgtattatctgtttgttgagatgtcatttgcctattttcccttatatatatactttcttatatctttgaacatactttaaatggttcatctgtgttcttaatctagtaaatataacatctgcacttcatgtgtatggaccctattttgtttcttttggtgtcctataatctttagttgaaatctttatatatatataaacacaacaacttggaatatcctctttggagttttttgttgctttttgttatatttttttgtttttttttttttgtttttttgcttgtttgtttgtttgtttgtttgagacagtgtagccctgtgtagccctggctgtcctggaactcactttgtagaccaggctggcctcgaactcagaaatccgcctgcctctgcctcccgagtgctgggattaaaggcgtgcgccaccactgcccggctgctttttgttattgattattgactttgtgagccaagtctatatggcttgtgtttttgtcatgtatggatgctaaaaacttttatatggctcacttagtagccaatcaggtaatgattagatggacattttggaaacactcaggaccagcgtttggtgagcacctccgtgtgtacctgttagaacgttcctttcagcacttggccaggccatccacacctgtgactccccattttctgtttctgcaaagcattgaggttaaccagaggtgagtgatctggtcagctcaggtctgactgtgtgctcaggcctgcatgtggccttagagatgagaggtctggtcagctcaggtctgactgtgtgctcaggcctgcatgctgccttagagatgaggggtctggtcagctcaggtctgactgtgtgctcaggcctgcatgtggccttagagatgagaggtctggtcagctcaggtttgactgtgtgctcaggcctgcatgctgctttagagatgagaggtctggtcagctcaggtctgactgtgtgctcaggcctgcatgctgccttagagatgagaggtctgactgtgtgctcaggtctgcatgctgcattagagatgagagatctggtcagctcaggtctgactgtgtgctcaggcctgcatggatcgtagagatgagaggtctggtcagctcaggtctgactgtgtgttcggcctgcatgctgccttctgggttcccaggaacctgccaaatgtccctttagcaaagcttggtagctaagtctcctgttcccgcagcagtgaccatctgccttaggcgtctgtgaagtactatttggctgtaattgactctaacaaacaccttatttgggaggtgagatgtttttcacattggataagcaccttcctaaattacagtgggtttcccctttctaaagtgagggaattaatacatcttcagcatcatcagcatcatcgccaccaccaccaccagcagcagcagcatcatcgccacctgcagcagcagcttcatcatcatgggatggaactttaaagaagcctcaacctgccgagcagttggtagcgcacgcctttaatcctagcacttgggaggcggaggcaggcatggggtggggaggtccttattccaacattttctgaatgttgattaattaatttgatcactaacagtgtcttgactcccacggactgttagctaagccagctcagtttggtcacatgttcactctgtcccgaggcatgttatatacatcctgtcacagtgagctctattgcttcaagaagtcgggggctgactgccaggtgagagcccagcttcaccatcttgctgttctcagcatctaacgttcctctcacccgtgttgcttgctcttccttacacagtttgtgctgggcttatgcacctaatttttatcatacttcaccggacatatctttgcagtaattccatcattccagattgtaaacattctcgctgttgaaagcactatcacacttcttaggtatgatttatttctgccaagaatgttagatagttactctgtattaatctccattaaaaagggggggggggaggaaaatgcagttgcttttcccaccatgccttccccagtggcgtgaagttcgaggagcgacttctgagtcggtcttcctttagggtgttgatcttaagcctggagttcaaaggtcatgtttgctatccaagttgagtgccagctgcacccttccctgttgatgaaagtgatttcagccatgggtttctgtcattgctttgactggatgtctgtgtgggttgtagcttgtgtacttgaacttgactactcggttgtcatttgtttcaaggtttgcggcaggaagcccaagatcgtagtctgtcatcttgacctctgaaccatttgggtgatgtttgatgctggggactttggtgctcatcctggctgtctctggaactcagggcctctcatccctggtaggaaagaccagtttatctggcaggaggttctagccttccctccctctgctgccctctgctggccatgctgggcgacaggacacctgtaattctgtctttccccagcacaggctgcttcccaggctcaaaccatctcatgtgggtggcactatttctgaatcccagtgagtgaagacggacagccagagcaggcttgcctggaggtggtgtgggtgggtctccatgtgctgcattttgagagctgccaaaaataccagtgagcaataatcccttccattagctcctttgtgcatgacatcatctctttgggtctggaacaacagtctgtgtgacagaccttgtcctcttcttgtgacagctgaaggacttactagggaggggaccccaaggctacagggaagacagcaaggtggaattcctttggcactcttcagacctgagtgtaccattctgtggtgcaaggttactgcacctggctgattgtaccggtcgcactttgtattagttttggagctggtgggagcaacccgctgctgtgccttgttgtacttttgtggtgtgcagaggccctggctgggaccagtgggtgccagggaagacacaactcacaaccttcagtcttgtatgagccccagcagtgactgccattcagaggttatttcggctagtgctgggcacacagtgggtagcacctgagtcctgggaggtggatgcaaagaggagtaccaatggatccttagccattagtccaacccatcaaaccccaatcctcctgcctctctggcactctctttgggtagcattgaatcttctcctgttttggtccctctggatctggtgacttacccgactctggaccactggtgattcattcggagtgtctcatcctccccacatgaggcaaaggctcactgtcccaaacgccctccacagctctctgtcagtctagctgccactgagtctgtcttcccttgtcatctcactcagaggccatgagtctgagatttcctttctcactggagagcacgaggccctcagaaccacgggatccatagaggggtggcccagggctgagagtttgcccatcttccgggttactgggctagttagatgggatttaaaagcacggacagtgcctctgccactcggaactctacaacacatagctcttcattggctggcacccaccttacagttcaccaccatccaccctggatgcagcctcactagaagtataccagccccgtttgtcccagagatgcaaaagctgagccagagaaagtacatccagacagcctcagggacttcagatgctcttgacgtcactcagccactgctgctgctgcatgctcatgaaattggttgggactttttttcctttcctgcagataagccttgcaaagggtggttggcatttaagaacagattttcatggtccccacaactgaagcccctggtagctgacttcaggagaagctgcggctgcatacagagcctctgggtgtgtgggtttccttttctctgcaggcatcctgccaggcccaagagataaatccttccaacagttccagaaagccctcagtctcactctccttggtctgaaaccaaccacaggtcaccaaggagacgcaacagcattgactggatcgatcatctcaagcctgagccatcggctcccatctcaggctacaccgtgtattaagagtgcggctttggcagattcttatggaatctgggctctcaacatagtttccagttctgttcaaagcatggtcccctctgtccagcggtgcctaggagtaggactccttttgagtagagagaaacctaatcaatcattaatccattacccatgggtcctcatttctaggtgctgcctactgtgtgctgaataggggctgaaattccacctcagctggccttacttgacctccagtggctcacagggaaagcattgtgtgtgggagcagaagccttggacatcgaactgagcctgcctcaacctggtccacttgtgacttggatccatcgcccttactgtcccctttctgggttggaaagcatcccgcccttccctgcagactctaggttctgtgtgaagagcagcgcttccagggaaacccaaagcctgcactgtaagaagcaactctcagaatggactgggtcaattctgagggcctcctatctcttctccagaggtagtgctccctgattcccaccagacagattcctgctggacacggcgggcttccgagcctgcatgaggcatgcactgaattcgcagcagcagcagttgcttgtctctcaggtgagcactgcatgcttatattggaggtgcatccccatggcactaagttggtaagcatcaatttaggcttacctcatgtatcgaaggttacacccagaggtcacagcatacctcactccaccgtggctgtcaccagaaatcacgtgggagcttaaatgacctgacacccaagtttcactgtgagctgagcagtttaaagccatggttctcacgtttggttctcccgagggtcctgtgagggtttggatgctgatgatgtagagaggggctgagggtgtgtagatctctggccagctcccattgggctgccttccaggtttctctgtgtcagggacactggctagggtccccctttggaggcctcctaatcttccctggtgggtgtgtacattgacctgtgccaggtccttccattacagactccagcccattgggctgcctgtgggtagaaactgaaattggacttgtggcctcccattcctggagttctttacttggttacaggcaggaacctagtgtacccccatctaacctatcagccaggaagccactgggacacccaagagatcggggcggggggatggaaatcaggggtggggcaggttttctaaagaggaaagcccccaggctgggttgcctctctctcagagcctgaaactctgaaaaggagctctcatgtctccttagcacccctagggggcagagtccttgcggggagcctcctctgaaggcaggtgattacacagaaccaagtgatgtaaatgggtacccgttcacatgtccgggcagggctccatgtggggctctcctggtacccctcttttcccctctctacttggagcacagagcacaagatgcctgtccaacggtacctgcagctgtttgtagtactcttgcctctggctggaaatctggtaaaaatggaggtatagaggaagaacctttaggttcttcgctaatgagctcatgccggagggctgggaagcttgctgtgcttcaggaacaggcacccccaaatagagtcccattgcctatggtactctgtgtactgatgcttcctgtcagtcctacttgcatgtgtgcatgtgtgtgtgcatatgtgtattcgagtgtgtgtgtgttcatgagtgtgtgtgtatgtgtgagtgcatggatgcatgtgtttgtgtgtgcatgtgtgtgtgcatatgtgtattcgagtgtgtgttcatgagtgtgtgtgtatgtgtgagtgcatggatgcatgtgtttgtgtgtgcatgtgtgtgtgtttgtgtgtgtgtgctcgcgcgctcgcgtgtgcatctttgcattgtgccaggtatgccaggcaagcgctcagcccctgagccacactcccacccttagtctgcctggtgatgaaggactctgtcacctggctcaggtgagatgttcctaatgttcaatcgagcttccattcaaggggaaaacacgtgttatttaggagagttgcagtatgtggtaaactgtgtgaccatcacacttttgcttactggaaggggaacgttgagaagtgcccagtattcttgtttatttgtgggatcctgcctgccctccttggtccctttcctgtgcatcaggcaatggaggaatatagtagttctccctagggagcattgtgcccactgcggtgacgcaagtgacccttgccagtggagctgtatttctatcttagtaactgtgctcaacttggtgctagggcgtacgcagacgccatcaagcatattagtaccatctttggagacttttagtctgaggagccagctggacccaagagacattcagtgctgagtggcaggggccatcagcatactgtggccacccccgctgaaacagttaggaaagggggaggcttgctgccttttttaggcctttgcaatacagaggctggagtgatttggaattattaggtgtttgcacataatgagccaatgtgtctccatattgctccatgtccccgctctccaaatgtgatgcttcaaaatcacagacgagggagatatttatgtcacaccaaaccagcccccggttctgaatcacacgggggcactttgtcagcggatcttaccaaatgaacaagacaaaatgaactctttggaaataatttttatcttagctgtttagaagaaagtttaacttgacaaaggctgctaaaacggaggtgctatgtgctaaagctgtggtcaggggacaggggacagttgggggggggtggctattccaaagtgaggaccgtgaaagagccatatggaacaccactagtctgtaagcctattaaacatattttaataaagtttgaccaaaagtaccccatattaataaacgatgttgctctcaagacatgggccattaaaagaaaatctcagtgccaggcaagcccctacaagttaccagtctgagaggtttctgagacacgcacaacatagcctgttgctattgctcttggctgcccactgtcactggatggcaagatattattgctgaatataccatgtactttggttataggacacagagaaatcaacctcaaagtgacaaagacactccatgctgtccagctttcacagtcccagaaagtgctgtgccagctgcacagtggccttacccaacgctgtccctgcatgctacaacgtaggcctagctgtgcccactggttaacagtgataaagatcgtttatggtgtcaaccaagtgttgtcttgattggatttgaggcttcctccacaggagggatttcatgcctggttatgtaaatgtggtcagaattcatgaccagagacattgtgggtcttgacggacaactgttgatgttgctttttctaaatggtcacttcgtcagactgcgtatatatatctctgagcttctcccacccttggtcagagaagcatgctactgcagggagtggtagttaatgcagagaccctttactgttcaaagataactgaccgggtgtgcctagctatagatggaacagctatctgatattcccatatcccctgcacgaccagggaccatcacagaagagggagcataaaaatgtaaaagaccgccatgcagtgctgcctcttggacatgactattacacacagaactcacaacagaggttcaaccagcacaagaccgagtcagttaaaatccccagctcagagcagggaggagctccctgggccctacctctacttgacaagctataggcagatgatggcggctgtgagcaggagactcgcttcttcaaatgagtgtgaccactggtgacttctccacggcccaggggatgaacccattcccacgtgcagatatatgggcaatagtaattagactcagtgggttaaaaataattatttagggaagacatgaagttgggagggagactagatgtgggtgggggaaatttggacctgagcatagtgtgtctatgatggagatacattgttgcgtgtgtgaaatttccaaagaatacagtttgttttttaaagattaattaattaatttgagtacattatagctgtcttcagatacagaagagggcatcagatctcattcctgatggttgtgagccaccatgtggttgctgggaattgaacctagaacctctggaagagcagtcagtgctcttaaccactgagccatctctccagccctgtttgtttattttttaatgaatgcaggtttgctctctgctgaccgctctctgatgaggtttcctgaatcataaggtgtttaccaagcctctgctgagtgtagaaattaggacatcaaaggtaaaaggactcaaaggccaggagagtgatgtgtacaacccgaaatgccagtaggtagggaagcttgctgttgccctgggaggggaaacatttcttatggccgagctgctgggcaaggcagagcactcacgcttcacctggaggccatgcagaacactaggtgtggcagtcgggggaactcagcaaggatggtaggagggcatttgtggtactgccatgaatgttcatttttctggacaacaaatcaacaaatatatatatattgggctcatctcaagcatgtgtcatgtgttgtctaaaatagctttacataaaaagaagtctatgctgggctgtagagatagctcactcagtaaaatgagcatgaagaattgggtgtggttcccagaacccacatttaagaagccatgtgtggtgtttcgatgtgtaacaaagcagaagaggtggagacaggtggaacccccctccccacccattgcttgctgaccagataccctggcctacttgataacctctgggctagtgagagatcctgtcatttaaaataaataaataaataaataaataagtaagtggatagcacctgaaggagcatacctgagattgtcctccgggatccatatgtacacacgcacacacacacatatgcagacacacctgtgtgcagtgcccactcccccacacacacgtacatgtatctatgtgtgttcacgaatgcaaagaaacctgtgccaattttatagtccttcaactttttaaaagcaatgtaacagagtccaagcagtgtataccacatgggcagaggcaagctgtttgtgtctgtcactcagcttgtgagataagaaggctagaatccagttctacagatttatcgtgacttctgctaacattggtcacaggtttatagccatgaatgggtctgagcacccggcagttagtagctgtctggagtactatgctgtgagcagtcctgagaatgatactgtgattgattgctgatgtctgccaaggacagtgagagggtggtgtcaggcggtgcccttttgcctcatcttttgttatggttaaaaagaggcacctcctaaggcaaaaactgtggttggtggtgactttaaaatgaaacgcccaacacattcattacaatttatagccatttactgtagtctatgcattccatgctgtgaacacaaagctgtccctcactacattccagttcttggagagaaacactgtcaatcaggaataaacccaccttaaacaccatcggcttgcaacaggatggggaacgtgaactcggttaacagctttaagctgtgtggtgcttttacaggctgcctaagatatttttaggttaagttaaaatagaagctaatttaatacctttttagctgctaacccaccgaggtgatttcagacttataaaggcattaaaatactacctccatttttgctgagttttaaaaggcaggcaaatgaagctgtacaatttggggtttgatgatttcattatttctaaaaatcttcatatcaggtccaaattcaaatgtccttccgagatgattcctggaaggctttgctcttatgtgtgacaagccagtttgcagatgtgtgtcttaccccaggatcaagctggttgggagaaaacttgggatttgactaaagcagaccaacagatggacaggtcatatttattggcacagtgctcagtatgtctgagaatgaatcgttggtgttaggggccaccctctaacccacagcctaccagcctgcctgcccacccaccccaccagagcaaacgtagactccactagccagctggttcctgtcacctatggacctcgatttctgtcctccgtgctgaagcctggcccttcactctcttgctacacactatttccagtggtccgtgatgctcctgtttgagtcctctgctctcgtgtctcatcctcagaggagttcttgcagataacaacactggataccagttctgctgggtgagggtctgggtcacactctgtccatggtcccagcctcatggtgcttagctgcggcagctgtgtagagggacagtgtgggaaaggacattaccctggctttgctctgtatgtgcgtaatctccacatagtgactacacagctgagattaccctgtgttacatgtgcccagagagagaaatggtgggttccctggagttgggagtgtcaggaggctttgccttcctgtcctgtgatctgagagatggagttggggtgacaatggttcttcagtctatctgtagctccatctggaagcagcactgtggcaatcagagaggatgagcctttctttgtaaaaagcaaaggaaaacaaacaacaacaaaaataaccacatctgtcacttgtacttgggctgcctctaaaggtaggatggtggtaatatccggtgacagtgggaagctggcctcaggacaaacaaaagacactactggttgcatctgctcttgcctagggattttccatggagccccgaaccccttcatttctgcagtggggatttctcaagggtctgagaggaggccacagcacttggtcccatctttaagaagttctttaatggtttcctttggattctgggagagggtagcgtgcacttggcatattgagagtaactgatgccatgtagcctgaggggtagcaactcctgcagtctccttttttccaggagggaactactatagagctttctcctcttcatcctcctcctcctcttcctcctcatcttcttcctcttcctcctcttccttgtcctcctcctcttctccctcctcctcatccccttctccttgtcctcctcctccccctccttcttcccatcttcctccttgtcctcccctcctcttcttccccccactccccctcctcctcttatttcttttttggctcatgtttcttctcctcatcctcgtcgttttttgttttttttttaatcttattttattttagagtatgagtgttttacccgcgcgcgcgcgcgcgcgcgcgcgtgtgtgtgtgtttgtgcacctggtaggtatccagggagatcagaaaaaggcattgggtctcttagcacttgagttgtggtaggttgtgaaccgctgagtgactgctaggaactgaatccaggcgctgtgcaggagcaaccaccctggcccatttctcctgctctcccctcaggtttctccacccaagttatacacccctagaaagaacaatggaagcctgttcacgggcagggccttatgggaactctttacatttggctcaatatgtgtgcagtccgtggcaaatttggagttttttgtgacagcatttttgagatatgaagcaagagcaggatatgtaacaagccaggagctacttgtaaaggttaatatgagcagcattcatccaagggatgattcggaagctaactcgtgcataaatgatattgtaaacatctcttgattagttttctaacttagctaactttgccgctgtaaaacacttagacccccacaaacacactttctctctcccagtgttgtttcaacaatgtgaacgttcagaattttaacacgaggtaaagcgcatagcaatgtcgagatggccatgcctgagtgagtttccctccgagggggtggctgtgtggagtggttcatgatgtgagggtccttcagcctgttttccagatggctggaccccgggggctgcgttcctgcgctgggccactccggtttgggccctgtttcttccctcaggtcagagcacagctgctgcatgaagcatgcaagttgagctgtcccaaatccaaggttccaggctgctgagggcaggcgaaccagcctcctctgcggtatagtgttcgaagcttctccactccaggactgcttccccttcagctctgtggcagagacaatgtccccagtgtggagttaggacaaactccccagaggagaaatgactgagccagcaggatgaggctctaaaaggcttttgatacagactatcagattgccgaacccgaagggatggaacctgactggtccctcaagcgcttggccagtgtttcttagcaggttgctgccatcttaggatagacaggcacttgggtcatggacaagctttgatttgagtatcagattttcagctactagatcagtgatcttgtaccagctgttcatccttgaagatcctgcgtccttctcttgtaaaactgagttatagcatcgaatccctggtgggtgtgggcactggatgagaggggatagatattctccaggacctgctgtgtttatgctgatccttctgaataatgtgatcctgggagcctgggatgttactatggcttgaatgtcctcaccaaagagcaagttggactttagtctccattgggaggcgttatgagatgggcaaactggggactcggcctagtgggtagaacacttgcctcagaaccatgaggataggagtttagatgcttggaaacccacataagtgccaggtgggtgtggcagcctgcccgtaatcccatcactctggagacagagaaaggggatccttgagacaggttgacaagctggataggtaaactagcagaacctgcaagctctgggttccagtttgagggcctacctcaatatatacgtgattgaggaagacaccagatttcaacttctggcctatacacacacacacacacacacacacacacacacacacagggtaggggggagagatagagagagagacagacagacagagagacagacagacagagagagagagaacttgaaagacatagaaaaagagatgggcaataaaaaataagaataagttgacccatctgtggattcatgggttaccgccagtggatctgtcataaaagccacttcacctctgtctcatgtctgcaacgctcacagggtggtgtcctaggctgtgtcaagactcttcagagtcactgccaacagcaaagcccctaccagatgcagcccctcgacgtcagacctctccatagagctatgagccaaataaacgtttattccttataaatcatcagtatgtcgtattattcagttgtaagaagagaaaacagaccaagacagaggtcctactatgaaaacattaagtatttttccacagaagactttctgttgcagtttataaatagctttctaatggatacacataggtgttatgagtctacaacccagaaatacatggtttagacattggaaccaaaagcgtagttcctgaaggctttgggtaaaaaaacaacccaccacagagagcatgctgggaggtggcttctgagggctacatcaggacctacctctcgtcactggtcactggtctctcgtcccatcactggtcactcttgtcatgcttttctctttaggttgtaaactcctgggctagaggtcggtataaaacagtttcgggaaaacagaagaaaagaaagagtgttttaggaccaccctcagaagtcggcctggattttaataatacagagtcacaccccacactcattcattatttgcctagccttttctgtcaacacttacaatgttgcttagaaactgctgactgtcgcctcccgcccgaggcaggcggtcagactttgctgaacttgacttgggctgccttgccaggcaggttcctggagtctattattttgaagcggtggctgtaggtggacagagaggatgtcactaagttgttggccttggcactgggagaggcagagagcccagccagagaggctgtattggtgacttcttgggtgggcgtggtcttgcacctgccaggtgtggtttctagcagggcggggcgagggggcgtgttttcagggacacacagagcaaagttagcctgttcctaaccacaagcagcagttggaagcccgggaaagggcagtttgaaaatgtatggggcccaaggaatcatgacaggcatcaaagtctcctccgcccctggctcctcggagtggacgtacctgggggcgggggctggggactggggggaggggacggctgcatggttcgggtgtataaacgggagtgggtatattttagattttctctacaccgagttgttttcttcccaggctctggccttctttagatagagaattgctttagggtcagagcctgggccattattcctgacaagctagtttggaaacaccctgtcctcagtcaatcaattaagataaattaatgaagaaaaaaggacggggagatttgttcattgtggcaacgctgggaagaagaacacagagatccaatgatctatcccaccctaattccctcttcagggtcctgataggagatttaggcttaaatagaggcctcggggtacgcatagctaaagcagtcctggccagggtgtggtactgcccatcgctttgcctacccattgtcttggcttcaggctctcctgcagggtaatctcaattgtgagaactgaaatcgcttcctgggagacaaattcctcctctgggtggcacaggtggcaatttttcctcccccccccccaaggtgaggctctgagaggaattctggggagcattatttcaatggggggggggcaggaagcacatgtttaggttgtgtccttcctgtaggaggacacagtcctgcccctcagcctttgccccttccctgtgaggacagcgagctgacgcctgcagttggttgtgtttgctctctgtggtgcagcagcgattccagtcaccgtgaagcaggtgacaaccactccagaccaactccccaaggagtcaggccacccccactccttgcccacaggagaaggaagtgtgcatgcctctcagagagccataactgccctgtgcctgcacacctgaccagggagccccggaggagctgtgttgctgtggttggcagaaaccccacttcctcgtggctcagaagagttgctgggggaacaaggacaggaactctgcccggtgcccagtggtgtcctaagagcccctggcccctcaagagtggacagtggcccactcttcttcctgctgccagaaggatgagagagccagaggcttgctgtacactcaggaagatgtctgccttttaccagtgcgtcaagcctgatccgaggtgggcccctgagagcaaggtggcgaggtgggggtcgggggggggggagtacagggaggcaggccacttggtcattgccagggcctgggtacctactgtcattgatactgaggccagcacttcacctagtgtattatgttctagaatacgggtgatctcctgtcttacagactttatcctttcttctccagttgtgaattttggaccaaaataataattttctgtgtttcctttttaacacacatttagatacaagagaatggggaaggagggagggagacacagccggctaggtaaacagaacgctccgttcttaatgtctcttgcttgtaccttggatctacaaggcataattgatacccttggagtagagagatggaaaccagaggtcaaggtgaaaagacactgccatgattacttgaagctcagtatgaacgggctggcccccagctgacaaacacagccatggaagataccctcatctcctgtgcaaatagccagctccccagcccactgaccttatccccggaggttctcagtgctctgtaattgtgtgcactgggtgcagagggagacgtagctgggactgatttaaattcacttgatcagcataagtaaatacattgaatgtctcatacatcagttagaaaattcctggtaggtcagcctccatccttacaaatactgtcttatccggcagaaagcagtgtgcatgtgggcctttatctttgtcactgcttcagaaggagtttactgatagtggcttaacctttatgtctaattctgcctattttgaatggcccaggaaagtgtggtggcctgtcttgttagtaggttttgggttgtgtcttcctatttataaatatcctcagttacacatctgctaaacctgtatattacatagtcatatgtatgtaatattctggaaaactcaagcattaatttcagcacacgtgaatgtgtgagtaagggttgtgttaccttaatatactcagaaagttaaaaataagctggctggtaaagatagtccttgcacccgggctccagggtcctgtccatcagacaggtgttcagcagtcagcacctgactgcaagctgtaagctcacatctggagcggtaaggctgtcatctaaagattagaagctcttacgttaaaggcatctttgcaagacacaccccagtattagcatggattcatattatgtttccccaagaattatgcaaatagaattgtaaagattggaacacccgtgcttagctatttttgaagtaatagtttggtcagaaatctttaatgtgtgtgtgtgtgtgtgtgtgtacaaattccttctaaattttaaggtaattatgaatatatattattatatatattctatgctatatataatgtttattatatgtttgtgtgtgtgtgtgtgtgtgtgtgtgtgtgtgtgtgtgtgtgtgttctatccctggtcttgtggaagctgccgtgcaatgttgtctgagaactgaatttctctcagatgtgtttgtgtggtaaaggttgctagtgaacatggattcctgtgtctatgagcatagcctgcgctaccatttacagggtctcctaacaccacgaagccagtgattatgcaatctgcagaacacggtagtctgtcttacataagagcctattggtgtgctcataaccgatgctatttatcttgtggatggctgagctgtcctgtgttttctttgcacagacacactcccaggagttgtggcctgatgcctcattttctccctgtgcctttgccagccctgtcctgctcacagctgaagggaagcctaggagcagccatcacctccaaaccaggccctcttctgtccccacattccttcactcgcacacagcaggccctcagagcccatcggggtgtgagggaaaacaggagcacctctcaggctaatgaagtaaccatggcatgacaaggacaagcacagtcctgtcagactttaaagtctgcccctcacacccagggatgctctatggcctcagcggtagaactgtgtgtggcacatgcacgccatctcatttttaataggaaattatctttgttctaatgaatgttgctaagaagtggtttgttcattcattaattcattcattcattcattcattcacttattcagcagtgttccttgagcccctgcattgtggcagtaccctgctaattacctaatctagtccccttttttccatagagctaccttcaagtgtacatacttagcaagagaggagtggcttgtatctccaggccaaactttattgttactattttctaagatgagcattaattaaaaggtactaagaagccccaatactgaccagccacttagttccttttctttctctgcaggctttagcagcagtagctgatcaacctctcatttcagacccttgcttaggaccccctgttggtgtaggtctgtcctggcctcctcctcttcctgacacgcaggtagggaagggtcacaaacatccaggtgtctgcttcagaacaggcaggcatctgttagaggcaggctggagtgacatccgttgtcaatgtcactgcctctgttcagtgggtacagccgtccagctcctctgttcccagggataataatatcattaagcagcaagctggcactgtttctgggcagagatttctcgcaagaactttgtgagatttgcacattccgtttgcttcgataatgtgaaacttatttttctataaaaaggagcaggcagatcctcgcatgactcactagagaacaatagtttaagtcataatttattttcgtccttttcttcccccaagagaaggagagattgattaagggttccggctagggatcaggtgcacatctgcaagcaggcgaccagtcagataatcacacgagcacgcacgcacgctcgcaaccaacaggtctccttcttgagtgcaaaggcacagaggctcttgcagtctgtcagggagatgctggcttacctgagggcctgggagccttccaggggagtctaagctgaagtcggaaggatgaggagggtcaggagaccaccgcggagctggaggcagggaacctggtacccagtgggaacaacatctgcaaagattctgggctggacggatgtgggtatctggggtttggagaacaggactggggtgtagacttgtgctgtgtgtgtagggggcctcgggtttgaatccaccctgccaccccctaatggtgttaggatctcccacatttatattgctctctgttcctgactacgtctccctctatctcacaaatgaatcatctttccttagtagctgttttaaaaattgtgcatgtgagtgaatgtatgtgagcgtatggatcagtgtatgtgtgtgtgtgtgtgtgtgtatgtgtgtgtgtgtgtgtatacatcatatacatatacatatacatatacatatacatatacatatacatatacatatacatatacgagttaagaatgtgtgtgtgtgtactatgcatatttgtgcagtgcccctagaaactagaagaggtgttaaatccccagggctggagctacaaacagttctaagctgcctgatatcaggtactagcaacctaaatcacagagctgggagtgttcttaaccactgagccacctctccagctccatctaatctttgttttagcaggagatcttggagacgaattgcatcaggttctcttttctaaaaatgcctttcccgaatccttctgcccctctggctacaagtttgcagacataagtgacacactatagccctaacctttctacacaataaggcaaatgggtttgaacagttgagcctgtgtgaacacaatgtcatcttacgttttaaactccccagaagaaaccttgtattcattgacagtggcctgccattaccccatcttcccacagcgctcctctcccctctgtgggcaatccttgatcggctctgtgtttctgtgtgatcctttacaacattcaaaggaatgcttgtgataaagtcttacgattaactttaacagaattcaatagtgccttaatagtacttcactcctattccagtgccacaaaggagaggtgggcccctcttatctgtcttaatttctctcttactgattttaagtcatcttatctttgtcttccaatagcttggttataacatgcgtctttcatttggacatagttctgcctacatggattaaactcagcttcttagatggtttctttctttcatcaaatttggggagttttcaccaagtccccaatactatattccccattattccatcttttcttctttcttttctttagattcactcatttgcatagtcccagttttgatctcagagagtcttctgccggttcagttccgcgtttgaagccttctggccagtctttcattctctttttgtttcacttccaggatttctctttgttgtcctttctaggttttttggttgctacttcagtattgttcatatggcggtttttgatacactccacacccttcattagctttcgagccccattgaaacggttgtgtagacctttgtctgtctagtgtagccaacaccaggtcttcttcagttggctcgtttttatcctccgagcagtattctctgttcctctgcatcccatgtgatcttgttgctgttactggccatcagatattgtggtctcacaatgcagtaagtaattctagaactcggattctctctttcctccaggtctgttctgttgttgctcttgggtctttgtcttttgacgttttcttctgtttgtttgctactattattatttgatagatttccagaggcctctgtattgatgagcaatgtaagcctgcacttctccctgggcacacatagtggctaatctctgtgatatgtgggtggttttgaaagatctaatctttaatgttgatctctcacaagggacaaagcattttaaaggtagaagagtggggaagggtgcttgtgtattcaatcctctggatttacctggtcactggaaggagtcttgtaaaagtagggggaggttgaacagtggctccacctcttcgtttgcctcattgtgaccccaagtggcagtcaagagcaaacatccttggggtgaaatacagagacctctttgccctttctagatcttaccagcagtgtgcaaaatgctcctggaatccatgcagtgcttgccaggggggctgggacctggcacacgagtgggtgctcctttgctaagagcagagcacgattgaaattaactattccctcttggaatccgtaagcctttattagaatacaaattccaagtagttttaccagacagaccctgccttttgttatccttctcttcttcctctgctgccttcccagaatcctctatgactataacgcattctcctttgccttggtgcctgagattggcgttgtgaccatatgaagattttctgtctgacaaacttttccaaagtggccttgacctctttcagtgagtgcatgtttttgtttattcacctacgtccacacacgtattgtccctgtcttggatgacggctgttctggcgaggaggtggtggtcctgtcttgtgatgtgatctgtgagtactgtcatttaggatattttcttgtgcctcctctacacggtcccattcaaacccttagtctttaaatgtaatggttcgaatacactcgcataagaatttcttctatatcctgcatattattcccttatcagacacatgattggaaaagacggtctcttactttctctgctagctttacacttttgtagtcctttgagacaaaaagataccatgttgatgaagccaaacttactactctgaacattgcatctgagtaattattgccaatccctagatctgagactcactcctgttctcttctaagaatttcaaatgcacctttggcatttatgtttcgctctgtgagcccctctatgtagcatgtatgttgtgaggtcagagtacagatacatttgcatacagatgtcccagtacaagttgttgaaaagattgccctttccacattgaattatcttgacatccttgttaaaaaatagttggcttttatagtatgcatttacatctggctccgatttcaaatctctgcatctatgtctgtcagttcaacgaaatcttattacagtagatttgtaaggttttttttttttaagatttgtgtgtatgtctgtgagtctgtgtgcccatgtgtaggatatctgtgccgcctatgcccttgcacacggagaccagagctagagttacaggcatttgtggtgggagctgggatttgaactctggtcttcaggattgtgcagcaagcactgtcagtctctgtgccatgttaaagccccattgataggatttgagagtggagcgtgaacactttgttcttatttatcaagattgtttgtactattctaggcttaaaatgtttttaattgagtaagataattgaaaaatacttgtatattgtgaattctcaaatatttgttctacaagttatagaaactcttgttatgaaattgatttttctcttcattttatcaatttttgcttcaagaacaaaagggttctctttttatatggcttagccttcatgtttataatagatgcattttcttgatagagtatgattttatcattattaaatgatactatttatctgtaattttttttctaaaactagttttcctgatattaatgtattggccagtttagaatattgttgaattcccatgtgattatatttttatatctgacttccttaatttttgttagaaaacacagtttattccactttaacccttttaagtatgcgtaggcttgttaggtcatggcgtcgtgtatcttggagtcttttatgtgatcttcagagtctgtgtattctgttgctatgttttttgttaccaggtggggtgatctgtggattcctgatcagtctagttaatgttgttcttcaagtcttttatatcctgttgacagaccgcccatttgttctaaaagttattagaagccaggtgctgacgtgcacatccatggttgtaagtcacggagtcaacgtaggtgccaatcaacagctgcattgagggctgtgtatgtgcacgtgtgtgcatgtatgttcgtgcatgtgcacatgtgtgtaaatgtgttcatgtgcatgcatgtatgtgtgcttgcctgtgtgaatgtgcatgtgtttatacatatgtgtaaatgtgttcgtgtgtgtgtgtatatatgtatgtgtacatgtgtttgcacatgtgtatgtatgcatgacatgtatttatattttaatggtgtgcgtgacatacccttaaaagaagaacaaagttacattgtttgcacaaaaattcatgttaattgaagcttgttgtgctatgtttatattcccaacacttgggaagtggagacaggaagaccaggcattgaaggacaacttcaatatgaacagatctgatgccagcttagataactagagaccacacccttactcccacacacacatatgcatgcataaaagacaagtatgttttttcctatatgtagatctctttaaaagacatatgagaagccaggcatggtggcgcacacctttaatcttggtgtgagttcaaggccagcctagtctacagagggagttccaggtcagccagggatacacaaggtgtgagactgaaaagaagagcttgtaggaggttagagttaataaaaacctgttgctggaggcaggggaatgttgatcacagtatcttatgtccacgtgtgaagtgtcctaatgaaacctggtagtttctacagttaatatatactaatagaagtgatcaaagagggcactgtatatttattatgttttcctgatagtataactattccatctttataaattgtcctcctatcgttaagaatgttcttgttttagggtttacttattactcttattggtatagccactctggattgtaggatatggcatttcattttcaacttctctgcactcatgaggctaaacttggtttttattttaatgtaatttttattttatgtgtatcagtgtctgcatgaatgtctgtgtaccactgggggacctggtgaccatggcagctagaagagggcatcagaccttctggaactgacgttacagatggttgtgagccaccatgtggttgctgggatttgaactcaggacctctggaagaacagtcagtgctcttaaccgctgagccatccctccagccctgagcatgggttgtttggttgtgtagtctgacagtgtctcccctccaagtgactgaatccatctgcgtctctgacacagttagccactccatctgcccctccttttctagtttctttagtgagtgctttgtccctctgtgcccaacaccttcactttgccttccttctcagtgcccttaaccgctgagccatctctccagcccagcttaattcttttacttctcctatgtctctgtgtgtaacatgtgtgggtgtatattcctgctcatgtgtgtgtagggggcagtgcatatgtgcagtgtgcatatggaggcctgcatttgacactgcaaggcttcctctgttgctcttgtccttactcatttacccagggtcctggttaaacccagagctcccctgaacctctggcgtacctagctagtctgttccagagatccccctgcctctgctgtcagagcactggattacagacaagctccatggacatccaatgttcacatggaccctggagaccccagggccctgaactttgtctcttcactcacatgtagattgatctagtcattgagccgtctctgcagccccccctcccccccacccccgtctcattcttcacagttcagtaccgcctctttgttctcctattttagctgtatatattgtgtctgtatttactgcaagcctaacaatgacaacatagcaaaaaaaaaaaattcctttgtctcttaaaggagctaaggggaataaataataagaaattatctgtggagaaaaaaaagatacctactttctttgatcagttttggttttcttttgtccaatgagtcatgattctgttttcctgatcacagctgtaaggcaggtggagtaggtcacctccctggctgagggtggactaagggttgttcaaacattgctatggaaagtgcacttggagagacatgcattgtgggaagatgtatcatatcacgcatgttccatgtgtggtcataaggtggcagcttatagaaaacaggctcagcccaataggtaagtgtagtaaaaaggatattaagaatcccgtcatgggtttctacccaccttagaccatttatgttctcagataaaagacacattgaacacaacctttatatattaatatgcctcaggcaacacaataactggacaactgcctacccccatgttattaaaatctacctttctatcactaactgaagttattgttcattatgttttatctaggctgctcttagctctaaccagccaacctacatggcaaccatatttttatggctctactagcccatgacggttctcctttctcccttcctacacattcttcttctgttccatggtgactgttcccctctctcctctccttctcttctccccagctattgacatctttatttaccaatcacaatcaactggggacagggtgttggcatcaggacctctgaaacctgtgacatcacataggcgacaaagcaacctacacacctgttgccaagacaacgaccatcatattcccagaacccattgggcttacctcccacctttacctgtgaccacatcaccatccatatatataagaaatctctctctctctctctctctccctctctctccctctctccctctctctctctctcctcttccccccttctctttctgctgacatcttccttgcctgcccctctctctcccaataaacctcttaaatgtgaaaccgttttggcctggggtactatgttcagactcgagccactattctaacacatnnnnnnnnnnnnnnnnnnnncaccaaaatagaaataatgttaggtcaccacaggtaaggaagtgagtttgtgcacctgcattggagggttcagggtttacgcaaaggcacgaggggacttgactgctccattggaatctcactaggtcaggggtgacaagaaagagaatgtatcacatgacccagccttatcacacaggtccacatggtctctcaggcttagtgttcacagatcatttgccaatgagttatcagggaaataggagggttttcaaagatttgtttttataatgttttcaagtatgtgtgtgtaagtgtgtaagctcccatatgcccacatagtccagaagggggtgtcacatcccatggagctgtagttacaggcagttgtgaacctcctgagatgggaaccaaactcagatcctttgtaagagctgtatgtgctcttaaccactaaaccatctttccagcctctgaagttttaaaaatttacattttaaaaatatttattatgtatacagcattcctcctgcatatatgcctgcaggccagaagagggcaccagatctcactatagatggttgtgagccaccatgtgggtgctgggaattgaactctggacctctggaagagtagccagtgctcttaaccgctgagccatctctctagccaccaacattttttcttatactgctcctttattctgtaattgtcaaatatgttacatttctatgtggtgtagcccggataattgaaatatcattctgtacagctgctttttaaatcaattggaaggaaaagggagaagatttttccaggaatgtggtttctgttagaattccctacagaattccttttgttatttgtggttttatgtgtatggattcgtgttactgtctggtgtttaactttaagcttgaaggacttagttgtgactgtaagggaggaacattagcaagaaataatctgctttttacttgaatgcccttatttcaattttcaaaattaacccttatatttatattgtgtacttgggtgttttgtttgatttatagcatgtaccaagtgcatgcaatgcccatagaggccagaagagggcgccatatcccctggacctggagttacagatcgtggtgagccgacatgtgggtgctgggaatcaaaccctggtcctctagaagagaagtcagtgctcttaactgctgagccatctctctagcccccttcctaattcttaatagatcattgcctatagagagttaatactgagctacttcgtgtaaaatgtgtgagcctcgtgacagggtagtcttgcccctctaccacaccttaatggcataggcttatccacatacactcttcacttacaacacttactttcttagattgttgcattcctttaaatccatttaaagaaagcaattggtgttttaggttttcccatggaggtatcttacccactgtatctcgtactgtgtttcctctgtgctaagggacatctttgatcttctcacatgtccctcgtgaacacattcctgagtgtccacttacctaaatatttatatctacacatatgtttatatatatacacgcttcattacttacggattatttttctgggttagatgccaggttgccagggcactgtggattctgctaacacattttgaagatgttactctgtttgtcttatctgctgatggccgttcattctgctgtctgcccacataagctatgccattctccttggagtgttattgaggtctttgacttcatctttgctttagtgtgggagtctacagactctgaggcctacgatctgcccaattgtgagctaagattctaagcttcctacatcaccaatacttgaattcacaaattctctaaattccttctcttttccttttttgttctcgacaccccaccccctttcctcctgccttcttctcttcagctttcaggttcaatctgatgtatttccccagtatcctaaagaacttctccttacatgttctgtagcacgcatctattgtaaacaaattattaaacttcatatttatctagagataggtaggtagatgatagataacatgtgcatatatatatatatatatatatatatacaggcagacatgcacatgtgtgtatgtgtgtatgttcatatacatatatgtgcctttattatttaaaaattaggttaatattttactttttatctgtatgagtatttttcctgcttgttgtctgcgcaccatgtgcatgcctgctgactgcagaggtcagggaaagagcatcaaatccccaggaagtgcagctatagatagttacagatcaccatgtgggcgctgggaactgcactgggctcttctgcaagagcagccagtgctgctaacctctgagccatctcttcagccccataatctttgttattgaaggataattgtgctccagctgctgggactcggttgcacatgtgagatcacctgcatcctgccatggcacggatgctctgtgagatcacctgctctgtccatgctcccttcctttctctctgcttttaggaaggtggcgcctgttgatttatctgatgtctgtctccaggctactgttgagaccatttggtgaatgcttcactgaggaaatgacacttttgtctttaaggtttgcatttggttcttatacgctcatatttccctttcagttcggaagtctatttacttcttgcaaccacaggtttcttttcagtcctcaaacaacttctttcaagtgtttagtctgttctgtgagccattggccacttgggctcactctctgtgaagtcatattcttcttctgactactggtcacatcttgctgtttctatgtgtggtcggcacgtttcgattccgtgtaagacactgagagaaatgtgggaactctggaaccagttatcttctctaaagagtgttgactttgctgactgttaacctgcttacaccacatctgtgagccccatctcttctctaacaggcagaagaagaaaaaaaaatcactgctcgctttccccagtttcccagatgtggtcttctaccaggctccttgacatagcctcaatttatgagcaattcacaggcaccaattcacgtacttagatgtctgctcttctttctgagcatctggccctctgctcaggcggccctgacttctctgagttctctgagtcagataggtcgtcagccaccttgccacacggatctgaagggtccacgggccgaaagccctgtgcatcataaccctctacaaccatttccttcattcaagatcagtgcttgcctaacatctgcctactttaggttgcttgatattccatatacacacacagtcaatctttctcacttgtaccaggctggctggacacaggcctcacccaccattaaggtcgaaggatatcattatttgcagttaagaatttatgtattatgtatacttttggcctgtgaagctttctgcttaaaatgttgttgcttctcagaaaataatacccttttggataatggcatgaagcttggtgggcacagagacttcggtaaacacagaagcctgatgtggggtgatagaagagaagagagggaatgttggggacagagtggaaggaaagcaaattgaagtggttttaacctagcctctcctcaggttgactaacacctattgccagcctcaggttcaggagactgagagaatccacaggggtcagagctgatctgcgtggtgaacaccaagactttcatccgtaattgcaggcttagatgtgtgtaccgaatgcagagatgttttccactgtgtaggtaaatgtagtggattggaacacttaggataacctattataacccatgcttcatgtgggcacatttaaagggtttctggtagaagtcgcagctactggtagaactcagctgttagctgggaaggagcctgtggccacagaatggaagaggaggagaccagcccccaccgcacaccgaggctgcttttggaaacaggactcccttggagtctgcaggtacccacaaacacactaagtactgcacaccgcagagcacctggaggagtgtagcatccttgtgagttaatcagacccctgaagaggcccttgaagtccaaatttagtctaaagaatacgttttcttcaataaggacttaacagctgtcagaaaatcaagggcatcaggtggggagcgcagatgcctgtgtgggcccgtggtaaaggcagagggtagatttgaactgtgagttcttggggcgagcatgactccctgtgagaagttaggatgagcttactcacggtggctttccactgcttcacagaggcaggggcacagtcctcacaagggcccaacagaggtggccagttgttagggctatgatatttccctgtaggatgtcctccacgtggtagagacacgtctccactagcgtagtctgtggtgggctcggggaatcctctgggatggtgggtgtggctcatcagttaacctgccgcagctggagtgtgggttaggaagcttgctcgtcagcagtcccgtgacagatagcggtgacgatgaagtgagccatttgctccgttttcatgagataagtttgacacctgcagtaaggatggcacacgggggcatgacaggacacagacaggaaggagtacatggtgaagaacgggctcagcaggcacttgctactcgctggctggctctggtcccgtgacggctgctcctcactgccatcctgatggggcttagagtcactgtggaaacacacctctgagtgtgtccacgggtgtgttttcaaaagaggatttgacagaatggggaagacctgccatgaatgtgagggtcaccccgtggtcatcatcactgggggcccaggctaacagaaagagggatgtgggctaaatgccagcactcatctgtgacctactcctttgctcttccattgccatggcttcgtgaactaaagcaagcccttccttaagttgtatttgccagggattctatcacagtgatgaaaaaggagattaacgcaggtcttattgggttaaaagtattattgtctgtcctttataagtggagaatcctttctgtaggtgcttcttggccattcgatactcctcagttgaaaattctttgtttagcactgtacccatttttaataggattattcggttctctggagtctaacttcttgaattctttgtatatattggatgttagccctctatcagatgtaggattggtaaagattttttcccaatctgttggttgccgtttttgtcctatggacggtgtcctttgccttacagaagctttgcaattttatgagatcccatttgtcgattcttgatcttagagcataagtcattggtgttctgatcaggaaaatttcccctgtgcccatgtattcaaggctcttccccactttctcctctattagtttcagtatatctggttttatggggaggtccttgttccacttggacttgaactttgtacaagaagataaaaatgggtcaatttgcattctctacatgctggccaccagttgaaccagcactatttgttaaaagtgctgtctttagtcatcagggaaatgcaaatcaaaacaactctgagattccacctcacaccagtcagaatggctaaaataaaaaactcaggtgacagcaaatgctggtgaggacatggagaaagaggaacactccatttctgggattgcaagctggtacaagcactctggaaataagtttggcggttcctcagaaaattggacatagtactacctgaggacccacctatgccacttctgggcatatacccagaagatgttccaactggtaagaaggacacatgctccactatgttcatagcagccttatttataatagccagaagctggaaagaacccagatgtccttcaacagaggaatggatacagaaaatgtggtacatttacacaatggagtactactcagctattaaaaacaatgaatttatgaaattcttaggcaaatggatggatctagaggatatcatcctgagtgaggtaacccaatcacagaagaacacacatggtatgcacccactgataggcggatattagccccaaagctccaaatactcaagatacaattcacagagcacatgaagctcaagaagaaggaagaccaaagtgtgggtgctttggtccttcttagaaggaaaacaaaatactcacaggggcaaatatggagataaagtgtagagaagagactgaaggaaaggccagccagagactgtcccacctgggaattcatcccatatacagacactattgtggatgccaacaagagcttgctgacaggagcctgatatagctgtctcctaagaggctctgccagaaccttacaaatacagaggcagatgcttgcagccaaccattggactgagcacagagtccccagtgaaggagttggagaaaggactgaagaagctgaagtggtttgtaaccccataggaagaacaacaatatcaaccaaccagatcccacagagctcccagggactaagcaatcaaccaagtagtgcacatggctccagctgcatatgtagcagaggatggccttgtcaggcatcaatggaaggagaggtccttggtcctatgaaggcttgatagatgccccagtgaggggaatcaagaacaaggaggtgggtggaggaacaccctcatagaagcagggggagggaggatggaatagggggtttctgggaggggggaaactgggaaaggggataacatttgaaatgtaaataaagaaaatacccaataaaataaataaataaataaataagaaaccagtttatcagcccagaactggtagggcctaagaattacagtgaaagcctgagacatcccaatatccaagctgtcttagtcagggtttctgttctttacaatccatcatgaccaagaagcaagttggggaggaaagggtttattcagcttacatttccacattgttgttcatcgccaaaggatgtcaagacaggaactcacacaggtcaggaaagcaggagctgatgcagaggccatggagggatgttgcttactggcttgcttcccctggcttgctcaacttgctttcttatagaacccaagactaccagcccagagatggtcccacccacaatgggccctccccacttgatcactagttgagaaaatgccttacagctggatctcatggaggcatttcctcaagagaggctcctttctctgtgataactccagcctgtgtcaagatgacacacaaaaccagccagtacacaagccctttcccttttaacgccattgtgcacgcgtctgtagcaagacagttggagctggaaacctgtgcaggagctgagggctgcagagtgcagctcctcggtcagtgggaaccgtttgtcttcttgagtcctctggatgttctggcatctcatggtactctgcattaacctttagagaggatcgaagaagtcacacacgtgtgaccaggtcccttcttgctcctaaaccctctgcacaatgtagctctatcacagagacaacattcagcctgggagaagcaggtctgagcctttgggctgctccaagatcataggacagaaagagggtcattgtcacctcccacccacacacacacaccctctgctacacccatgggggctcatgcacactctctcacaaagccatacataccccggcacttcctgtccttgacacttttcatatgccagaagtggcgtcgcggtttctgtagagtctcagctacacagctcatacacctcaaactccttccctcagcctgagaatccagtcagcctcggtgccggaatcctggcctcatctaaggctgggttgctcggtgggcagagccatctaagtgggaggttctttgctttgaactccctggcttccctctgctccatccaggatgcctccgtgtgcacaaatggagctccccatggcaacacctgagagaggcagggaccaggtagagcttgtctgtggctgcatcccagtgccacagaagctcctgtgctccccagtgcggtccggtccgtgtgagcattgagaatgagccctgctttactacctcagggcactctcccttctgccttgggtccttcctttatagcctctcccttcaagactactggttagttcctcagcctccagtactgtcactgagcaagccacacagacagcagagtggctaatggtgccacccagccatcttgggtggcggcaggtgagtcacaggcggtcacctctttggctgtgtcatctgttactttgaccttgaacaccatggagaggaacttgtagggcagtcagtccgcagtgacgtgagcaagggctgcttctaccccacttcgctttatgtctatgtccggtgggctcaggcgcgtgatgttctgtcagagggtttgactgaactgatgtgaggccagacatttccatgaagctgaattgcgtggggggtttgggaggggtggcaggagctttctttcagcctttaagaaatcatccaggtgtcagagtgatgaaattaagagttcataccgctcttgcagaggactcaggttctgtcccagcactctctcctggcctccataggcacctgcacactgtctgtctgtctgtctgtttctgtctctctctttccctctctctctctctctctctctcacacacacacacacacacacacacacacacacacacacacacttaaaaaccataactaaggataggtgtggggccgcattcctttaatcccagcaaccaggagtacgctggctaggtttatgtaaacttgacacaaactagagtcattctggaagaaggaacctcagttgagaaaacaagcctaccagattggcctgtgggcaaatctgtgttattttcttgcttgatgattggtgtggaagggctcaactcagttatgttaccctggactggaggtcctggatgttataagagagcaggccgagcaagccatgaggagcaagccagtaagcagcacccctaagtggcctctgcatcagctcctgcctccaggtctgccctgtttgaggtccggtcctgacttccttcagtggtgggctgtgttgtcgaactgtaaactgaatgaaccctttccccaccacggtgcttttggtcacagtgttttatcacagcaatagaaactttaattatgacagggaggaagaagcaggtagatctctgtgagtttgcagccagccttgtctagatggcaagctccaggccagctagagctacatagtgagaccctctctcaagtaatggtgatgatgatggtgatggtggtgatggtgatgatgatggtgatggtcatgatggtaggaagaggaggatggtgatgagagtggggatggggatggtggggatgtaatagtgatgaaaacattttaaagaaaccagcctggagggaggacaaacaccctaacacttatattacaggccgcctaaatattaatgccaactccagcacagaacgtcgtgtatgtttctgtcctgctgttaaatatatccattctatctgccacccccccccacttccctgtcattattaccttgtgtaaaagccaaactatgaactggctaatcaaatatttgaaccgctctttttcagcccaaggattcatagtcactcccagaaaaaaaagaaaaacaaacaaacaaacaaacctttccagatagaatgtgctgtacccagagggagggagggctgtcttgggttgggtgcaggaggcaagaaaaagttgcacccatttctgtagcaggataatgtaatggttgagtcagtcacatacttttgtttaggaagaaggtaaatccaagtgggcagaatggttgtcatccctgggctggattacttgggaatgacctagtgagcgtgggtgtggggtacggcgaaggagggtaattttatgtggggttcaccaaatgtccactgtacttctgtctttgctctcaatatttcccaagttcaaaatcagaagactccatgtaaatagtgacactagactattgcactgccattcaggtgacacccaggaagaattttaacccagcagtatgctaataaaaaccaacgctaagtttctgaacgtggctgacagctatctgtttaaaggtgcattggataacctgttgtgactatccttggttggcgggattacgggtggtttttgttttgttttgtttttttaaatttgagggcaactttgaaaacctctgacctgccgttgtgttttctgtgacactgctgacatcggccattagaaagccgcttctgtggttgccacccatgtggctgtggacgtggtctttactgtccgtctctctgccctggactctggcttttcagaggtgggtgcaggggaggtgacaggcagaagcattccccacagccatggcacgcatcggtcgctgtgcacgacgacgtgttcctctgacatggatttccttctgcttttagtgacccggacatgatttccacgagggtgatggacattaaacttcgggaggctgccgaaggccttggggaagatggtgcaggtgagaccccccaacgtgccctgctttgggggtggggagagctttgtttggttgcatggagcctgctctgtagctttctttgtggagaggaacatccatccccccatacctggtctgctcagacattccccagctccatgctgtctctgggaagacaacagcctcaccacttaatgccatctggcaacattgctttcttgctgctctgccaaagagtggggtctttgtctttttctttttcctggaggcaaacatggccctattgttgacttgaaagcaaaggagcagggctgaagctggagtacctgcacttcttgggggcggggaggtcacattcaaggccagattgggctacacgtagaggccaaggctaaatggctctgtttagcacccaagggtacgcataggaagttttgtcaagtacaggatgagctgattctccagagaaattgcatcaaaagggcctttgtcccttcttctacaacttttccagtccctttatcttagcctctgctgagccagcttccaggctcttcagaacacattctgagaatgcctagtcatgagactggtgtttatgtctagatacagttgtgaagttgataacgccactggtctccctccttgttaacaaaggtctccaactctctcctgttcaaattcaaagtcccaagagtggttttctttgagctaggtcaggaagaataacgtcccatgataatgaacccatgaaggataacttcccatgacaatgagcccatgaaggataacttcccgtgataatgaacccatgaccggcttctgccttcagatacttatttcagtggacattctattttgtgtatgaagatggattgttcggtttaccttaggaccagctttctgtcatatttcagtagctattaaataaatccaactactaagtaagggtgttttaagattaaccctgagtggggaaaaatggtcatgcaagctgtatcatgggacactaaattattgcctcttaaaataagaaaatgttatagcaagtatttaatttctcacaaaatagcttcagtagaggccagtttggtcaccgtgaggaatcaattttagaaaatgagagaatctatgtgttgagttttgttgttgtttctaataatagtgaacttgcggtaatcagaccaatttttccttcttaaaatttgaatattctagatgagaacatgaattgaaaggaaaacggtagcttagaaatgtaagtgggaaaattttccttcagtcttttactctgaaactttgaatctcattttcttgttgggtaggatggggaggcgggtagaaggtaatatactggatccgaggagacccatctgatagaaggccttcccttggacaagctacagctgtagaggtctgaaccacagatagactggccttcctgtgcacctgtagtttcagttgtttgacttggaaaatccagagaccctcaaccttgtacttgggtcagtagtgctcctagatcagacttgaccccagggactgtgcagaagcaaacgctcttcttgaaggactgtcaaattgtcttacctagagtagggcacttgggaggtgaaaaccggacatcaggccatcctcagctacagaggacgttcaaggctagcttgggatactataagaccctttctcaaacaaatcagccaggtcagcaggcctcgtgagatgctccgaggttaagagcagcactcattgctcttgcagaagacttgagttcaatttccaggagctacgctgtgagactcacagccctctgtaaccccagttctagatctgatgcctacacatggtgcatttacatacgtgcaggcaaaacattcacatgtgtgtgtgtgtgtgtgtgtgtgtgtgtgtgtgtgtgtgtatacacacatatatacattcacacatacatcttctggccatgctggcagagacattatatacataatcaatcaatcaatcaatcaatctcatgtgtgtgtgtgtgtgtgtatatatatatatatatatgagataaaataaaatttaaaacagaagagaagggaaagtagaaaggagagagacagagaagaaaaagctccatctatctgtttctcacaggatctaaaacaactcaaagggagctacagacataagtgagagatcccatcctttataagggtaagaggagatacatattacctacagctagaccagagtctttagatataagaccttattaacccataaaaagaatctatgagtggaacctcatcgaaatttaaaacttttctcagcaaaaacatcattattatgaaaataaaaacaggactggagagatgctcagaggttaagagcaccagccgctcttccagaggtcctgagtttgattcccagcaaccacatggtggctcacagccatctgtaatgagagctggtgccctcttctggccttgctggcagaacattctatacataataaataaataaataaataaataaatcttaaaaaataaaataaaaatataagtcacagattggggaaactgtaaatcatcccaattaaaaaaacttacatccagcatacattttaaactatccaaaataagataacagcaacaactagcctaatttaaaattggccagggacttttaaacatggtttgcctaagcatgtggacaaatggcagcatctgtattcctttataaattaaatataaattaaaaactgcagctttaaactagattaaaacttaaaaaaaaatttacaggtactggtcatgacgctttgccttgtagaatacaaaccgggtatagccactttgaaagacattttggcatttctcatacactgaagagttggcctaaggacagtggaaatgtgtttacacaaagactgaaggtgactttattcatgatcgccaaatgtccttcagctggccgcgtggttcaaccgaccagtgtacctatagaacagactaccactcaacaataaaaaagaacagactatcggtgtttaatagcagtacaaatgagttcctaaatgaaaagcgtccagaatcaaaggctgtgtcatgtgacctgatctgcactccgtgactcagcgacgtaggaagagcagatccatggacctgctccttagcgatggggaagcgtgaggagatgggacagacttgctctgcatcttggttgatctgtaaataccagagtaatggttaccctgatttaaaatattttaattcatagtgccagttttcaaaacaagtggattatttttcaaagtaaatataattagcggaacttcagcgtggtgtttaagagcagaccacacaagctcaagatcacagggcagagaggaatgtggagaaaatgggaaacgtcaaaacagacagagctgagagcctgtagcacacattcacatgggctaagagaggatgcccggaaaattctagaattgttaagaaagaaaaacaaacaaacaatagcctcgtccgcagatttaagctgcccagtgagggctggagaggtggctcagtggttaagagcacttgctgctcttgcaaaggacctgagtttagttcccagcaaagccacctgaaactccagcttcaggccagctggtaccctctcctggcctctgcaggctcctcaagtgtacagacatatgtacctaaataaaaatcaattaattaaagagagaaagatacccaatgattcctaagaggagtaaagggagtaatagatcaataaaatgaacaaatcaatcaataaataaacccaataactcctaagatgaataaattaaaaggcagcagaaatacactgggaaagatgtagaaagccaaagccaaattaagagtcttaagtccaaggaggagagagatctaccttcacaggagcaaggagagtcatgggtgattcttaacagtaccgcaaagcttcgagtgatttgaaaaataactaccaacctgaaagtccaaacctaaagaggacgtttgtcaggcccaaaggggaaacagaggcgttgtcaaagacctctgcctgcctctgatagactccttaaaaattgtgaagtagatggccgggcgtggtgatgcacgcctttaatcccagcactcaggaggcagatgcaggcagatttctgagttcaaggccagcctggtctacaaagtgagttccagaacagtcaagggccatacagagaaaccctgcctcgaaaaaaccaaaaaaaaaaaaaaaaaaaaaaattgtgaagtagaaattgacaactaaagaaaggtcaataagaccttcgtctgtctctgtctctctctcaaattattaggacaaatttatttattttaaaaattagtacagatataaaatataaactcaaaatgaaaatggcagagcccaaattgccagctctaaaacagagaagaaaataccctgtttcctgagcattataggaagtttatggaatcagtcaatacgtgaaaccataaagtaagtctcaacggatttgaatagaacaaacttcagagtgccttatcgcactccaattaaattaatgacggagaggtagaagtttgccaagtgtttggaagcgaagacatgcctttccgtaggtcacatagatctaaaaatgtatgattgtggacatcagacaatacttcaaaccaaagaataatgacaacacaaacttttatgatgtgtagaacttaacagatctagagggaactgtatttcctgaaatgtatgtattagcaaagaaagagaaggttttaaaaaaaagaaccttttttaaaaacaaaatcgtaactctgggcctcggggtgtggcttaagggtagagctctcacctggcttccggagccctagaagagctaactcttcacaagccatcggtgtagctgaccaaggaaaaaggaggcacaaataattaacacggggcatgcacaaggacataccaccacaggtgctgtggatgctcgacacagcagtgcgtttccgtggtaacttttgccaggaaatgtgaagtgttaagatgcagataaatccctatgtgtgtgagacaacagaacagactgaagaagtaacatgggtcggtcctgtagctgtttaagaggctgggtcacaaagtctaggaggggaagattaactcttgaggtacgtgtgcatgcatggatttaggtgtctagatccatgcagtgcctgcagtggccagaagagggtgccaggtcgagagaagctgggtttttccattggcatagaagcgctcagctgtcacactctgctctgcttagccacgctcccaccccctgagcagcacccgggtgtcaaggcaggaggcctgtttacttgtgaaggtctccagggacacctaataatatgttgactacttgaaggccaggtggtgtccctgtcaaacgcaaagacttcccgagagactttcagcacaagctctgcgtggagaaccatctgcacgcaagataaacatcccttgatttacaaggaagtttccatcggacattgagaaaactgccgtagcaggcttgtcccctctggagcaatgacatttgcctggctcttgctggcagaatctcaggttattccccacgtgaagacaaggtcatttcaagttcccgaggggactttagcacaaagacaattaaaaggaccctctcttatatcttaaatcagttctatgtggaacttacttaataaagccgccttagacagttttagcaaacgtcggctgtgtcacatggcagatctgtgtgctcgggttctcttcccttttaccatccggtcttacagatactctgagaaggacagagcgtggctagagctgtcctggggcagtcatgggtttctgggcctaagaggccttgtgggcaggaatgaaggtgacatcggaggagcacactccgacccctttccactggagcaacagccacaattatttgctcattcttcttacatacccaccccagtacacaattttaaaaataaaataaatccttaaaaagtaatatattaggaaaaacaacttggattatcaattgccattgtctgtagtattctgagcccctggtttctgctcacctgcacccctcgcacacctgcaccgctaatctttcttcttgtcatctgaataggaaagaaaaagtcgaaatttaaaacttttaagaagctgtttgggaagaagaagagaaaggaatccccctcacccacaggaaacagcgcctggaagcannnnnnnnnnnnnnnnnnnnagcttacacccaccttgtagctccagttcctgggatctggtgctctctcagcatctctttggggagtgcatgcatgaagtacacaaatagacacacatctatacacatgcattttttaattatttttttaaagatagaaaccaatatttgtttcagggctgcagaccttatatgtcgtgtctgtagtattctgagcccctggtttctgctcacctgcgtccctcgcacacctgcaccgctaatctttcttcttgtcatctgaataggaaagaaaaagtcgaaatttaaaacttttaagaagctgtttgggaagaagaagagaaaggaatccccctcacccacaggaaacagcgcctggaagcaaaatccggccaagagcgaggtcattgccgttgaggagtcggggcccgtgtatgactctgaagatgagctggagtaagttgctctcatgtgcgtctggcttgtgagcctcaagaggagggggacaccaggcacaggaggtgtccggagctcttatcttcagtgccttaggatcttgtctgtttctgagcttcctccccacctgggtgatgtgagagccttgggagtctcttagtgcatggtgtgtctattagcttttccaagcacagggatggagaaaggtgggggaaagctggttgtgtacttgctacctgctgggtgtgggaaccgtttaaaaggtcatggtaattggggctggagagatggttcagtggttaagggcacttgcagagaactgtgatttgcttcccagcacccacatgatggctgaaccatctgtaactctaattctgagctctctgacgcctctgagagtctacatgtatgacacatgtatgtacatgcaggcaaatcactcaaaagcataaaataaaactttataaactctttaaaaaaaaaataagttcacaggctggagagatggctcagcagttaagagcactgactgctcttccagaggtcctgagttcaattcccagcaaccacatggtggctcacaaccatctgtaatggggtcctatgccctcttctggtgtgtctgaagatagcgacagtgtactcatatacataaaataaataaatctaaaaaatatacagaaagaagttcacagctatgcctgggaagatggttctgtgtaggtctgtaattccagagctcctgaaacaacacgggaggcagaagcaggccttgctccagaagctcatggacgagctggcctggggtttggggaaggggtgcgagctggcctggggttgggggtggtgaagcttgcctggggttggggggtgagctgaataacaaaggacctgtcccaaacaagctggaaggaaaggactgccatcggagcttgcctctgacgcatacctgggtactgtggcatgtgtgcacccagagatacagtttttttttttttaagagcaaagtagctgcaaaagatttgaaccataacagaaatcagcaaaatcagccaaaagcgaccaggtaggctgcccagaatctcacagaaaggcaggactgggacacggaccctggtttaaattatccaagaatgccctaagacctgggacacagtaccaggaacacacatctctggacttgaacgatgattaagtaagggctcattctctagagcaaggcctgtggatagcaaggctatggcttcttgtctggacctaactaattcagatccactggggatggacactcaggcagctctgggggacaatacttttattttgtaacttgtaattcatcacaatacagttgtgtgtctcacaaggttgtattttggactgaagagaagaggaggaagcttgaaatatcttttaaacatcaactctcatgtcagggtaaaatgctagccaggaggatatcgctctagaggcagagaagttacactggccacttggtggcgctgtaagactgaagctggagaaccagtggtcctgccccccaccccaccccgcctcccccccccccaagctagctagaagtagaagggggtggtgggggtggtagatgccttgtatgactgcaaagttgttggggaaggggcagttctggctagcccagggaaactctaatcctacccccatctccttgtgtttaaaaaacaagccaggaagtaatctctctagccacaaacaggaacgtagctagaggaccaggctctggggatgcaacccatacgtgttccttttcataggaacccaaggaaagtgggacagggcccttgatatctgtctgtgactagcacacagtaagaacatgattgacgttagttaatgaaagaaagatggtgggggtgccggtggagagacagacagctcagcagttaggattgcacacccttctacagagtgcctgagttcagttctcagcacctacaccaggtggctcacagctgtctaactccagcgccggactgtaattacaggcacctgtgctctcgtgcaccccaccaccaccgtgtgtgtgtgtgtgtgtgtgtgtgtgtgtgtgtgtgtgtgtgagagagagagagagagagagagagagagagagagagagagattgattgattgattcaggataaaagaaaaaagaaaaaatttagccgggcttggtggtgcatgcctttaatcccagcactcgggaggcagaggcaggcgaatttctgagttcaaggccagcctggtctacaaagtgagttccaggacagccggggctacacagagaaaacctgtctcaaaaaacaaaacaaaacaaaacaacaaaaaaaaacaaacaaaaaagagaaagaaaaaatttaaaatttaaaggtgattagagacccggtacaatgaggttctagagggaacgatgactttttccaggtcaacactgacgaacagacagtttctttagtttctgtgagaatctgtcatcagactctgcagcaacttctgcaaggtcacaggcagatggcctgtgctggggtgtcctggtgctggcttcgtcagtgacagccccctgggtccctttgcctacagaacaccctgctctctgcatctgccctcagtacactggagctacagcctttgttctcctgattctatattggctcatagtgatctagatgatcggttctcaacctgtggggctctacccctttgggcgtcacatagcagatatcctgcatatcagatattcacattgtaattcataacagtagcaaaattacagttgtgaagtagcaacaaaaaataattttacaattggggaataccacaatgtattaaaacatctcagggttaggaaggttgagaactgctgctctaaaggcctagacgttgagcttggagagatgtgtggcctgcccctgtatcaaaaggcagatttatttattctgtactgtgttctgcctgcatgtacacctgcaggccagaagggggcaccagatcccattacagatggtcgtgagcaccatgtgtttgctagggattgaactcaggacccctggaagagcagaccacctatctccccagccctattctatcaatcttaatcctgagtggtcgctgtcattactccccggtttgtatctgatgcccttaacatgtagatggtccatttcctcagtgcaaaaactgtgggtttctaattcctctgttcattttacacattgctgggtttcttctatgaagaactttcctttatcaggagcaggagagatggctcagcagttaagagcacttgttactcttgaagaagatctgggttcagttcctaacaccttcatggtggctcatagccatctgtaacttcagttccaagagatccgatgtcctctgatctcctcaggcaccaggcatgcatgtgctatccatctatgtaggcaaaccctcacatgtgtgtaaattaaataaatctaaaattttttttaaaatagctttcctttgtcaacttcatgagagcctgaagtacaagctgttcagggaaaacaaactaatgcttggttggtgttcgagtggtgtctgctcccagagtagtccctgacactgccacacctaactgtgaccaaaaaaaaaaaaaaaaagtttttttttttccctctaaaagatcattgtggacattgtattttttaaattttttaaattttgctttatttacacagaattctatgtaacctagactggcctcaaattcactgtatagtcaaggacaagcctgcacttcaaccatccctccatcttcagagtgttgggattataagtgtaagccaccacacccaatcccatgcggtactccagaaggaacattgggctttgtgcatattagctgggcactctaccaacccagctccatacacatcgaccccaaacactctgatttcgaatatatttggtgtgccttagtccataacagtctttattcattgtctcatcttgcgatgtgaagacttccttctgattagcttccctctctttggtcgtgagcccagccattgctgaaaggttccttgctttcctgcacagggagacgtcccagttcagtgctgtatgcttcctggcttggatctttttcacaagctgtgtttccttcctgtcagagagaacttgccttggagatcacggcatgggtgtggtggccaggatggctactcagctatagtgtcttctagaccactactgggtaggactaggaaataggtttatttctgagagaattctgagcagtttcattccaggggagatgaaacttcttgctttatttccctgtatcctgtttcctgttacacggaaaagcttggcttgtgatgaaattgctttctgctttcttcctgtaacagtgacttctctttccccatttccacagcgatcctcctgcctctcactccccagtactgtgccatgatatgccattgtgtctgctgtaaaattaggcttttcccccctagtcttagagatttccctcttggatggactttgtgtcttgttgggtaacacactgtatatttccaaagacaaaattgtaactgttgttacctttcacactgtctccctatccagttctttccttcccacttaaaccacattcgtgtatctgccactgtatcagtttttattttaaaaaccattagcaggcatagtacttgctcagcatgtctgcatgttcccactgctctgcccaactgatgtgccacattcttctgtcccgtgtgttctggtaagcacacgccagttacacctggactggagatgtttgggcagtagttagggattccagagggtggacccaggctgttgactgtaggaagaaaatctaagtgcatgcatgtccttggcatttggagcgtgtgctctgtgggctgagtccttctgagtgtctgtgaagatacacccttccaggcactctggatttccacttgcaggctagaaaggaaacaccattgagctgggatgctcaatggaagaatactttcctggtgagtgcgcgcacgcacacacacacacacacacaatgcacacatacatatagtattacaacacagttggatatgcagtaggacagggcacaccttcaagtccccagtgcctcatagaagacaggatgcccaaggaggacagggtggggctggtgcacacaagatgtccagtgcatgcagaggccgctttccttccttaactgaatgtctcagccacctccttccacctattattcagcaggctagggagttctgacggctaattcccatatcctctgagagcattttatgaatgtcctgggactttctttgagtcaggtcctcagacgtcagccgggcttccactcttccggtcacagcacagtggtgggatacacaaaccatgccagatcatccatgcagagagcatctctacaggcctgcagttcttgtgtctatggtctggaccatcttggggagatgctgctgtgcctccagcctccagcttatgggccccacgttagcttagccctcagcccacagcctcacattcccagggcacctgagacagattcccacaggacccagccagcaccagactttcctctccacaggctagtgactcggacctcacgcctccaaactttcggtttttttccactaatcaaaataatccacaagcttcacatctcttaggaaaatgccccttttgtaggttctgactagtgtttgacggtgaaagggacagagaagcaactgctaactgtgtgtgacagagggctttggggggatcacattaatttatcccttctctcactctgagtccctaggatcaggggcagatggaggtggtggaagctcacagtggctctttttatcctagggagtccaggggtactatgggcagccgggccctctcccacgacagtattttctttcctgaatcgggacaggaccctgctcggcccgtgcgggtgttctcccaagaaaatgtgtgcgaccggatcaaggctttgcaggtaagggttcgcttggcactctcactgggtgtctgtccagtgttaatctagaagtttctaagtgatctcagcttagcattttatacagttgaaagtcgggtcacaggttcttcacgggtctcaggcatgcaagttagtcacattctgactcactgttggtgactgcctaaagaataaggacagtggtgagggagctggggacagacattcaggtcagggcactgtgctagggtgctgaagttatttcctgaatgaatgaatcagagcaggaagatttgttgctagctattgttgatgaaaacactaagaatggttactattccctcaatctagttaaagatacaatgtaacgtgaagatggggccaccgcctccaggaggccttcctatcaagcgggcagaggaaaccggcatgagttctgaggatgacggactgccccgcagccccccagagatgtccctgctgcacgatgtgggtccaggcacaactataaaggcgagtacagtctgtgcccttgaatatttccatccactcctgacactaagcattgatagaactctggaggaccctccatgtcttccagcaaggtctcttgagtgagggagactgcgctgccgttttgtgcggttgtgtggtcagtctgatgccatctgctctgtgccttatctttcttgtctgagcagatgcccagacccagaaaagaagggcaggggctccctctcctctgcatctcccctcccatggcagtggccagagcacaaagagaagagtaaacactgaattatattcagccctgttcctgagtcctgaccgcagaaacctgttggtttgggcgagtcacatgaagccctcagggtaaaggcagcccagggagtctgaccagcagtgtctgacctcagccactgcaggaagtgatcccaactgttgtacccccatagactccatttcacaaagaaacaccccagcatgttcatgggctacttttgtttgtggtaagaatgttaatgtacacatatatagaagacaaacaggatggccattttctccatattagtaagccaagcgaagggcaaatgggaatgatccaaatgatattgatccttgaaaaacaagtaaaaacagagttggtgtttgatagctgggcatccttggatcccgttcaaccctggccctgccagggcgttgtttacaatgtaactgtagagttaccacttctgggctgtttggaattgtattcggtaaccactcaacttaggtacatagagttccctcttcccagacacgagcttgttctttcttgtagttgtgagcacccagaatattagtaatggaaaatcaggactgtggtgtggctgattttaagtcagctctaggggttggcaactcccatggagctgcctagagtatgactcccagaatctggcctcagggaaacctatctctggtcacagtaagagtaggctctggggccagaggctaccaacccacacctgctctccaacttcaagaaggcctggatgatggggaaggttgccttactctgtggaataaaactatgcccgttagcaacttaaaacactcttgtgtacaattgcattgtcccttttcagaattagatatggctgtgtgtcaggctctgtttgtgaggcgatacctgtgaggagctacctgctggttcatttttgactttaccctccttcctctatctcttgagccttggactccagtctctgacttacagtagctggttctatctgcaattggctgcattgggtggggcggggtggggtttcggggagcagcttcatttgttgaagacagagttcaactccaaacccgatcaccactgcagtgcacaaattttaattagccaagtgggggtcacttgtgcaggggccacacttacctaacttttttattccaatggttctgactttttattttaagatgaactctgaggttgtaccagttattgggtagtataccaaatctgctttcatcgtgggaagccaacgtttgggaatggtgggtgcacggctttcattccaggaggaggcagatggagctctgtgagttcaaggccagcctggtctatagactgagttccaggacaaccagggctacatagagagactttagctcaaaaagcaaacaaacaaaaatgttaaccggacactaatatttaggtccagtgttccaatagagacatgcagataataattattattattatctttgtttgcatggttgtttagagatggtgggttgttcttggaacctagaggatggatcccagattctctctcttttgtactagttggttttgtgtcaacttgacacaagctagagtcatcagagaggaaggagcctcagttgaggaaatgcctccatgagatccagctgtaaagcattttctcaattagtgatcaatgggggagggcccagcccattgtgggtggtgccatccctgggctggtcgtcctgggttctataagaaagcagactgtgcaagccatgaggagcaacccagtaagcagcacccctccctggcctctgcatcagctcctgcctccaagttcctgcccccatttgagttcctgaactgacttcctttgataattagctgtggaagcattagccaaataaaccctcccctccccaacttgcttttggtgatggttcgttgccacaatagaaaccctgactaagacatcacacacctgagctgcatgcactatagcatagcatctgtgctttgcaggacagcctgccgacacccactccaagaagaggctcactgtattcagtggggcaggcatcttagggtattctctcagtcttccttctgtcacctggcaacgcatttgctcactgctgactgctagttcctccccgctgaggtgtaaactagtaacatgcctgtagctcaccatatggtagccgaaagccagactcctcgtgaggctgtaaagaccctttccaatgaacaaagtttgccagataagaggctgacagggggctccatgcttcctgtgacctgaaccctgatgtctcactgctgggccacatgccaagcttgacaaaaacagcaggttcctccacccctagagacactgggctagtctgttttgttggttaaagtagctatggaaagtcttcctgtgaagaggagtggcctcagggttgtccccaccctttgacctcccagtcatttgctctaaagcgatagtcttaaacattccccaactgaaattccccaattgaaaatactctgctccaggtacaggctagagagcccagacgcacaccaaaggggagctggtaggatagcagtctccatccttgtcactaaattaatgcttggtgtgtttgtcccttgtgacacgaagatcctagtgtcctcgtcccggccacagtctcccgaccacatgagcgatgcctccatctcgtctcggaccttggatg

SEQ ID NO: 5 - DNA, 623 bp, Mus musculus
tcatttctaggtgctgcctactgtgtgctgaataggggctgaaattccacctcagctggccttacttgacctccagtggctcacagggaaagcattgtgtgtgggagcagaagccttggacatcgaactgagcctgcctcaacctggtccacttgtgacttggatccatcgcccttactgtcccctttctgggttggaaagcatcccgcccttccctgcagactctaggttctgtgtgaagagcagcgcttccagggaaacccaaagcctgcactgtaagaagcaactctcagaatggactgggtcaattctgagggcctcctatctcttctccagaggtagtgctccctgattcccaccagacagattcctgctggacacggcgggcttccgagcctgcatgaggcatgcactgaattcgcagcagcagcagttgcttgtctctcaggtgagcactgcatgcttatattggaggtgcatccccatggcactaagttgtgacccggacatgatttccacgagggtgatggacattaaacttcgggaggctgccgaaggccttggggaagatggtgcaggaaagaaaaagtcgaaatttaaaacttttaagaagctgtttggga

SEQ ID NO: 6 - protein, 106 aa, Mus musculus
IGAEIPPQLALLDLQWLTGKALCVGAEALDIELSLPQPGPLVTWIHRPYCPLSGLESIPPFPADSRFCVKSSASRETQSLHCKKQLSEWTGSILRASYLFSRGSAP

SEQ ID NO: 7 - DNA, 46285 bp, Mus musculus
  misc_feature (1)...(46285): n = A, C, G or T/U
agaacccaagactaccagcccagagatggtcccacccacaatgggccctccccacttgatcactagttgagaaaatgccttacagctggatctcatggaggcatttcctcaagagaggctcctttctctgtgataactccagcctgtgtcaagatgacacacaaaaccagccagtacacaagccctttcccttttaacgccattgtgcacgcgtctgtagcaagacagttggagctggaaacctgtgcaggagctgagggctgcagagtgcagctcctcggtcagtgggaaccgtttgtcttcttgagtcctctggatgttctggcatctcatggtactctgcattaacctttagagaggatcgaagaagtcacacacgtgtgaccaggtcccttcttgctcctaaaccctctgcacaatgtagctctatcacagagacaacattcagcctgggagaagcaggtctgagcctttgggctgctccaagatcataggacagaaagagggtcattgtcacctcccacccacacacacacaccctctgctacacccatgggggctcatgcacactctctcacaaagccatacataccccggcacttcctgtccttgacacttttcatatgccagaagtggcgtcgcggtttctgtagagtctcagctacacagctcatacacctcaaactccttccctcagcctgagaatccagtcagcctcggtgccggaatcctggcctcatctaaggctgggttgctcggtgggcagagccatctaagtgggaggttctttgctttgaactccctggcttccctctgctccatccaggatgcctccgtgtgcacaaatggagctccccatggcaacacctgagagaggcagggaccaggtagagcttgtctgtggctgcatcccagtgccacagaagctcctgtgctccccagtgcggtccggtccgtgtgagcattgagaatgagccctgctttactacctcagggcactctcccttctgccttgggtccttcctttatagcctctcccttcaagactactggttagttcctcagcctccagtactgtcactgagcaagccacacagacagcagagtggctaatggtgccacccagccatcttgggtggcggcaggtgagtcacaggcggtcacctctttggctgtgtcatctgttactttgaccttgaacaccatggagaggaacttgtagggcagtcagtccgcagtgacgtgagcaagggctgcttctaccccacttcgctttatgtctatgtccggtgggctcaggcgcgtgatgttctgtcagagggtttgactgaactgatgtgaggccagacatttccatgaagctgaattgcgtggggggtttgggaggggtggcaggagctttctttcagcctttaagaaatcatccaggtgtcagagtgatgaaattaagagttcataccgctcttgcagaggactcaggttctgtcccagcactctctcctggcctccataggcacctgcacactgtctgtctgtctgtctgtttctgtctctctctttccctctctctctctctctctctctcacacacacacacacacacacacacacacacacacacacacacttaaaaaccataactaaggataggtgtggggccgcattcctttaatcccagcaaccaggagtacgctggctaggtttatgtaaacttgacacaaactagagtcattctggaagaaggaacctcagttgagaaaacaagcctaccagattggcctgtgggcaaatctgtgttattttcttgcttgatgattggtgtggaagggctcaactcagttatgttaccctggactggaggtcctggatgttataagagagcaggccgagcaagccatgaggagcaagccagtaagcagcacccctaagtggcctctgcatcagctcctgcctccaggtctgccctgtttgaggtccggtcctgacttccttcagtggtgggctgtgttgtcgaactgtaaactgaatgaaccctttccccaccacggtgcttttggtcacagtgttttatcacagcaatagaaactttaattatgacagggaggaagaagcaggtagatctctgtgagtttgcagccagccttgtctagatggcaagctccaggccagctagagctacatagtgagaccctctctcaagtaatggtgatgatgatggtgatggtggtgatggtgatgatgatggtgatggtcatgatggtaggaagaggaggatggtgatgagagtggggatggggatggtggggatgtaatagtgatgaaaacattttaaagaaaccagcctggagggaggacaaacaccctaacacttatattacaggccgcctaaatattaatgccaactccagcacagaacgtcgtgtatgtttctgtcctgctgttaaatatatccattctatctgccacccccccccacttccctgtcattattaccttgtgtaaaagccaaactatgaactggctaatcaaatatttgaaccgctctttttcagcccaaggattcatagtcactcccagaaaaaaaagaaaaacaaacaaacaaacaaacctttccagatagaatgtgctgtacccagagggagggagggctgtcttgggttgggtgcaggaggcaagaaaaagttgcacccatttctgtagcaggataatgtaatggttgagtcagtcacatacttttgtttaggaagaaggtaaatccaagtgggcagaatggttgtcatccctgggctggattacttgggaatgacctagtgagcgtgggtgtggggtacggcgaaggagggtaattttatgtggggttcaccaaatgtccactgtacttctgtctttgctctcaatatttcccaagttcaaaatcagaagactccatgtaaatagtgacactagactattgcactgccattcaggtgacacccaggaagaattttaacccagcagtatgctaataaaaaccaacgctaagtttctgaacgtggctgacagctatctgtttaaaggtgcattggataacctgttgtgactatccttggttggcgggattacgggtggtttttgttttgttttgtttttttaaatttgagggcaactttgaaaacctctgacctgccgttgtgttttctgtgacactgctgacatcggccattagaaagccgcttctgtggttgccacccatgtggctgtggacgtggtctttactgtccgtctctctgccctggactctggcttttcagaggtgggtgcaggggaggtgacaggcagaagcattccccacagccatggcacgcatcggtcgctgtgcacgacgacgtgttcctctgacatggatttccttctgcttttagtgacccggacatgatttccacgagggtgatggacattaaacttcgggaggctgccgaaggccttggggaagatggtgcaggtgagaccccccaacgtgccctgctttgggggtggggagagctttgtttggttgcatggagcctgctctgtagctttctttgtggagaggaacatccatccccccatacctggtctgctcagacattccccagctccatgctgtctctgggaagacaacagcctcaccacttaatgccatctggcaacattgctttcttgctgctctgccaaagagtggggtctttgtctttttctttttcctggaggcaaacatggccctattgttgacttgaaagcaaaggagcagggctgaagctggagtacctgcacttcttgggggcggggaggtcacattcaaggccagattgggctacacgtagaggccaaggctaaatggctctgtttagcacccaagggtacgcataggaagttttgtcaagtacaggatgagctgattctccagagaaattgcatcaaaagggcctttgtcccttcttctacaacttttccagtccctttatcttagcctctgctgagccagcttccaggctcttcagaacacattctgagaatgcctagtcatgagactggtgtttatgtctagatacagttgtgaagttgataacgccactggtctccctccttgttaacaaaggtctccaactctctcctgttcaaattcaaagtcccaagagtggttttctttgagctaggtcaggaagaataacgtcccatgataatgaacccatgaaggataacttcccatgacaatgagcccatgaaggataacttcccgtgataatgaacccatgaccggcttctgccttcagatacttatttcagtggacattctattttgtgtatgaagatggattgttcggtttaccttaggaccagctttctgtcatatttcagtagctattaaataaatccaactactaagtaagggtgttttaagattaaccctgagtggggaaaaatggtcatgcaagctgtatcatgggacactaaattattgcctcttaaaataagaaaatgttatagcaagtatttaatttctcacaaaatagcttcagtagaggccagtttggtcaccgtgaggaatcaattttagaaaatgagagaatctatgtgttgagttttgttgttgtttctaataatagtgaacttgcggtaatcagaccaatttttccttcttaaaatttgaatattctagatgagaacatgaattgaaaggaaaacggtagcttagaaatgtaagtgggaaaattttccttcagtcttttactctgaaactttgaatctcattttcttgttgggtaggatggggaggcgggtagaaggtaatatactggatccgaggagacccatctgatagaaggccttcccttggacaagctacagctgtagaggtctgaaccacagatagactggccttcctgtgcacctgtagtttcagttgtttgacttggaaaatccagagaccctcaaccttgtacttgggtcagtagtgctcctagatcagacttgaccccagggactgtgcagaagcaaacgctcttcttgaaggactgtcaaattgtcttacctagagtagggcacttgggaggtgaaaaccggacatcaggccatcctcagctacagaggacgttcaaggctagcttgggatactataagaccctttctcaaacaaatcagccaggtcagcaggcctcgtgagatgctccgaggttaagagcagcactcattgctcttgcagaagacttgagttcaatttccaggagctacgctgtgagactcacagccctctgtaaccccagttctagatctgatgcctacacatggtgcatttacatacgtgcaggcaaaacattcacatgtgtgtgtgtgtgtgtgtgtgtgtgtgtgtgtgtgtgtgtatacacacatatatacattcacacatacatcttctggccatgctggcagagacattatatacataatcaatcaatcaatcaatcaatctcatgtgtgtgtgtgtgtgtgtatatatatatatatatatgagataaaataaaatttaaaacagaagagaagggaaagtagaaaggagagagacagagaagaaaaagctccatctatctgtttctcacaggatctaaaacaactcaaagggagctacagacataagtgagagatcccatcctttataagggtaagaggagatacatattacctacagctagaccagagtctttagatataagaccttattaacccataaaaagaatctatgagtggaacctcatcgaaatttaaaacttttctcagcaaaaacatcattattatgaaaataaaaacaggactggagagatgctcagaggttaagagcaccagccgctcttccagaggtcctgagtttgattcccagcaaccacatggtggctcacagccatctgtaatgagagctggtgccctcttctggccttgctggcagaacattctatacataataaataaataaataaataaataaatcttaaaaaataaaataaaaatataagtcacagattggggaaactgtaaatcatcccaattaaaaaaacttacatccagcatacattttaaactatccaaaataagataacagcaacaactagcctaatttaaaattggccagggacttttaaacatggtttgcctaagcatgtggacaaatggcagcatctgtattcctttataaattaaatataaattaaaaactgcagctttaaactagattaaaacttaaaaaaaaatttacaggtactggtcatgacgctttgccttgtagaatacaaaccgggtatagccactttgaaagacattttggcatttctcatacactgaagagttggcctaaggacagtggaaatgtgtttacacaaagactgaaggtgactttattcatgatcgccaaatgtccttcagctggccgcgtggttcaaccgaccagtgtacctatagaacagactaccactcaacaataaaaaagaacagactatcggtgtttaatagcagtacaaatgagttcctaaatgaaaagcgtccagaatcaaaggctgtgtcatgtgacctgatctgcactccgtgactcagcgacgtaggaagagcagatccatggacctgctccttagcgatggggaagcgtgaggagatgggacagacttgctctgcatcttggttgatctgtaaataccagagtaatggttaccctgatttaaaatattttaattcatagtgccagttttcaaaacaagtggattatttttcaaagtaaatataattagcggaacttcagcgtggtgtttaagagcagaccacacaagctcaagatcacagggcagagaggaatgtggagaaaatgggaaacgtcaaaacagacagagctgagagcctgtagcacacattcacatgggctaagagaggatgcccggaaaattctagaattgttaagaaagaaaaacaaacaaacaatagcctcgtccgcagatttaagctgcccagtgagggctggagaggtggctcagtggttaagagcacttgctgctcttgcaaaggacctgagtttagttcccagcaaagccacctgaaactccagcttcaggccagctggtaccctctcctggcctctgcaggctcctcaagtgtacagacatatgtacctaaataaaaatcaattaattaaagagagaaagatacccaatgattcctaagaggagtaaagggagtaatagatcaataaaatgaacaaatcaatcaataaataaacccaataactcctaagatgaataaattaaaaggcagcagaaatacactgggaaagatgtagaaagccaaagccaaattaagagtcttaagtccaaggaggagagagatctaccttcacaggagcaaggagagtcatgggtgattcttaacagtaccgcaaagcttcgagtgatttgaaaaataactaccaacctgaaagtccaaacctaaagaggacgtttgtcaggcccaaaggggaaacagaggcgttgtcaaagacctctgcctgcctctgatagactccttaaaaattgtgaagtagatggccgggcgtggtgatgcacgcctttaatcccagcactcaggaggcagatgcaggcagatttctgagttcaaggccagcctggtctacaaagtgagttccagaacagtcaagggccatacagagaaaccctgcctcgaaaaaaccaaaaaaaaaaaaaaaaaaaaaaattgtgaagtagaaattgacaactaaagaaaggtcaataagaccttcgtctgtctctgtctctctctcaaattattaggacaaatttatttattttaaaaattagtacagatataaaatataaactcaaaatgaaaatggcagagcccaaattgccagctctaaaacagagaagaaaataccctgtttcctgagcattataggaagtttatggaatcagtcaatacgtgaaaccataaagtaagtctcaacggatttgaatagaacaaacttcagagtgccttatcgcactccaattaaattaatgacggagaggtagaagtttgccaagtgtttggaagcgaagacatgcctttccgtaggtcacatagatctaaaaatgtatgattgtggacatcagacaatacttcaaaccaaagaataatgacaacacaaacttttatgatgtgtagaacttaacagatctagagggaactgtatttcctgaaatgtatgtattagcaaagaaagagaaggttttaaaaaaaagaaccttttttaaaaacaaaatcgtaactctgggcctcggggtgtggcttaagggtagagctctcacctggcttccggagccctagaagagctaactcttcacaagccatcggtgtagctgaccaaggaaaaaggaggcacaaataattaacacggggcatgcacaaggacataccaccacaggtgctgtggatgctcgacacagcagtgcgtttccgtggtaacttttgccaggaaatgtgaagtgttaagatgcagataaatccctatgtgtgtgagacaacagaacagactgaagaagtaacatgggtcggtcctgtagctgtttaagaggctgggtcacaaagtctaggaggggaagattaactcttgaggtacgtgtgcatgcatggatttaggtgtctagatccatgcagtgcctgcagtggccagaagagggtgccaggtcgagagaagctgggtttttccattggcatagaagcgctcagctgtcacactctgctctgcttagccacgctcccaccccctgagcagcacccgggtgtcaaggcaggaggcctgtttacttgtgaaggtctccagggacacctaataatatgttgactacttgaaggccaggtggtgtccctgtcaaacgcaaagacttcccgagagactttcagcacaagctctgcgtggagaaccatctgcacgcaagataaacatcccttgatttacaaggaagtttccatcggacattgagaaaactgccgtagcaggcttgtcccctctggagcaatgacatttgcctggctcttgctggcagaatctcaggttattccccacgtgaagacaaggtcatttcaagttcccgaggggactttagcacaaagacaattaaaaggaccctctcttatatcttaaatcagttctatgtggaacttacttaataaagccgccttagacagttttagcaaacgtcggctgtgtcacatggcagatctgtgtgctcgggttctcttcccttttaccatccggtcttacagatactctgagaaggacagagcgtggctagagctgtcctggggcagtcatgggtttctgggcctaagaggccttgtgggcaggaatgaaggtgacatcggaggagcacactccgacccctttccactggagcaacagccacaattatttgctcattcttcttacatacccaccccagtacacaattttaaaaataaaataaatccttaaaaagtaatatattaggaaaaacaacttggattatcaattgccattgtctgtagtattctgagcccctggtttctgctcacctgcacccctcgcacacctgcaccgctaatctttcttcttgtcatctgaataggaaagaaaaagtcgaaatttaaaacttttaagaagctgtttgggaagaagaagagaaaggaatccccctcacccacaggaaacagcgcctggaagcannnnnnnnnnnnnnnnnnnnagcttacacccaccttgtagctccagttcctgggatctggtgctctctcagcatctctttggggagtgcatgcatgaagtacacaaatagacacacatctatacacatgcattttttaattatttttttaaagatagaaaccaatatttgtttcagggctgcagaccttatatgtcgtgtctgtagtattctgagcccctggtttctgctcacctgcgtccctcgcacacctgcaccgctaatctttcttcttgtcatctgaataggaaagaaaaagtcgaaatttaaaacttttaagaagctgtttgggaagaagaagagaaaggaatccccctcacccacaggaaacagcgcctggaagcaaaatccggccaagagcgaggtcattgccgttgaggagtcggggcccgtgtatgactctgaagatgagctggagtaagttgctctcatgtgcgtctggcttgtgagcctcaagaggagggggacaccaggcacaggaggtgtccggagctcttatcttcagtgccttaggatcttgtctgtttctgagcttcctccccacctgggtgatgtgagagccttgggagtctcttagtgcatggtgtgtctattagcttttccaagcacagggatggagaaaggtgggggaaagctggttgtgtacttgctacctgctgggtgtgggaaccgtttaaaaggtcatggtaattggggctggagagatggttcagtggttaagggcacttgcagagaactgtgatttgcttcccagcacccacatgatggctgaaccatctgtaactctaattctgagctctctgacgcctctgagagtctacatgtatgacacatgtatgtacatgcaggcaaatcactcaaaagcataaaataaaactttataaactctttaaaaaaaaaataagttcacaggctggagagatggctcagcagttaagagcactgactgctcttccagaggtcctgagttcaattcccagcaaccacatggtggctcacaaccatctgtaatggggtcctatgccctcttctggtgtgtctgaagatagcgacagtgtactcatatacataaaataaataaatctaaaaaatatacagaaagaagttcacagctatgcctgggaagatggttctgtgtaggtctgtaattccagagctcctgaaacaacacgggaggcagaagcaggccttgctccagaagctcatggacgagctggcctggggtttggggaaggggtgcgagctggcctggggttgggggtggtgaagcttgcctggggttggggggtgagctgaataacaaaggacctgtcccaaacaagctggaaggaaaggactgccatcggagcttgcctctgacgcatacctgggtactgtggcatgtgtgcacccagagatacagtttttttttttttaagagcaaagtagctgcaaaagatttgaaccataacagaaatcagcaaaatcagccaaaagcgaccaggtaggctgcccagaatctcacagaaaggcaggactgggacacggaccctggtttaaattatccaagaatgccctaagacctgggacacagtaccaggaacacacatctctggacttgaacgatgattaagtaagggctcattctctagagcaaggcctgtggatagcaaggctatggcttcttgtctggacctaactaattcagatccactggggatggacactcaggcagctctgggggacaatacttttattttgtaacttgtaattcatcacaatacagttgtgtgtctcacaaggttgtattttggactgaagagaagaggaggaagcttgaaatatcttttaaacatcaactctcatgtcagggtaaaatgctagccaggaggatatcgctctagaggcagagaagttacactggccacttggtggcgctgtaagactgaagctggagaaccagtggtcctgccccccaccccaccccgcctcccccccccccaagctagctagaagtagaagggggtggtgggggtggtagatgccttgtatgactgcaaagttgttggggaaggggcagttctggctagcccagggaaactctaatcctacccccatctccttgtgtttaaaaaacaagccaggaagtaatctctctagccacaaacaggaacgtagctagaggaccaggctctggggatgcaacccatacgtgttccttttcataggaacccaaggaaagtgggacagggcccttgatatctgtctgtgactagcacacagtaagaacatgattgacgttagttaatgaaagaaagatggtgggggtgccggtggagagacagacagctcagcagttaggattgcacacccttctacagagtgcctgagttcagttctcagcacctacaccaggtggctcacagctgtctaactccagcgccggactgtaattacaggcacctgtgctctcgtgcaccccaccaccaccgtgtgtgtgtgtgtgtgtgtgtgtgtgtgtgtgtgtgtgtgtgagagagagagagagagagagagagagagagagagagagagattgattgattgattcaggataaaagaaaaaagaaaaaatttagccgggcttggtggtgcatgcctttaatcccagcactcgggaggcagaggcaggcgaatttctgagttcaaggccagcctggtctacaaagtgagttccaggacagccggggctacacagagaaaacctgtctcaaaaaacaaaacaaaacaaaacaacaaaaaaaaacaaacaaaaaagagaaagaaaaaatttaaaatttaaaggtgattagagacccggtacaatgaggttctagagggaacgatgactttttccaggtcaacactgacgaacagacagtttctttagtttctgtgagaatctgtcatcagactctgcagcaacttctgcaaggtcacaggcagatggcctgtgctggggtgtcctggtgctggcttcgtcagtgacagccccctgggtccctttgcctacagaacaccctgctctctgcatctgccctcagtacactggagctacagcctttgttctcctgattctatattggctcatagtgatctagatgatcggttctcaacctgtggggctctacccctttgggcgtcacatagcagatatcctgcatatcagatattcacattgtaattcataacagtagcaaaattacagttgtgaagtagcaacaaaaaataattttacaattggggaataccacaatgtattaaaacatctcagggttaggaaggttgagaactgctgctctaaaggcctagacgttgagcttggagagatgtgtggcctgcccctgtatcaaaaggcagatttatttattctgtactgtgttctgcctgcatgtacacctgcaggccagaagggggcaccagatcccattacagatggtcgtgagcaccatgtgtttgctagggattgaactcaggacccctggaagagcagaccacctatctccccagccctattctatcaatcttaatcctgagtggtcgctgtcattactccccggtttgtatctgatgcccttaacatgtagatggtccatttcctcagtgcaaaaactgtgggtttctaattcctctgttcattttacacattgctgggtttcttctatgaagaactttcctttatcaggagcaggagagatggctcagcagttaagagcacttgttactcttgaagaagatctgggttcagttcctaacaccttcatggtggctcatagccatctgtaacttcagttccaagagatccgatgtcctctgatctcctcaggcaccaggcatgcatgtgctatccatctatgtaggcaaaccctcacatgtgtgtaaattaaataaatctaaaattttttttaaaatagctttcctttgtcaacttcatgagagcctgaagtacaagctgttcagggaaaacaaactaatgcttggttggtgttcgagtggtgtctgctcccagagtagtccctgacactgccacacctaactgtgaccaaaaaaaaaaaaaaaaagtttttttttttccctctaaaagatcattgtggacattgtattttttaaattttttaaattttgctttatttacacagaattctatgtaacctagactggcctcaaattcactgtatagtcaaggacaagcctgcacttcaaccatccctccatcttcagagtgttgggattataagtgtaagccaccacacccaatcccatgcggtactccagaaggaacattgggctttgtgcatattagctgggcactctaccaacccagctccatacacatcgaccccaaacactctgatttcgaatatatttggtgtgccttagtccataacagtctttattcattgtctcatcttgcgatgtgaagacttccttctgattagcttccctctctttggtcgtgagcccagccattgctgaaaggttccttgctttcctgcacagggagacgtcccagttcagtgctgtatgcttcctggcttggatctttttcacaagctgtgtttccttcctgtcagagagaacttgccttggagatcacggcatgggtgtggtggccaggatggctactcagctatagtgtcttctagaccactactgggtaggactaggaaataggtttatttctgagagaattctgagcagtttcattccaggggagatgaaacttcttgctttatttccctgtatcctgtttcctgttacacggaaaagcttggcttgtgatgaaattgctttctgctttcttcctgtaacagtgacttctctttccccatttccacagcgatcctcctgcctctcactccccagtactgtgccatgatatgccattgtgtctgctgtaaaattaggcttttcccccctagtcttagagatttccctcttggatggactttgtgtcttgttgggtaacacactgtatatttccaaagacaaaattgtaactgttgttacctttcacactgtctccctatccagttctttccttcccacttaaaccacattcgtgtatctgccactgtatcagtttttattttaaaaaccattagcaggcatagtacttgctcagcatgtctgcatgttcccactgctctgcccaactgatgtgccacattcttctgtcccgtgtgttctggtaagcacacgccagttacacctggactggagatgtttgggcagtagttagggattccagagggtggacccaggctgttgactgtaggaagaaaatctaagtgcatgcatgtccttggcatttggagcgtgtgctctgtgggctgagtccttctgagtgtctgtgaagatacacccttccaggcactctggatttccacttgcaggctagaaaggaaacaccattgagctgggatgctcaatggaagaatactttcctggtgagtgcgcgcacgcacacacacacacacacacaatgcacacatacatatagtattacaacacagttggatatgcagtaggacagggcacaccttcaagtccccagtgcctcatagaagacaggatgcccaaggaggacagggtggggctggtgcacacaagatgtccagtgcatgcagaggccgctttccttccttaactgaatgtctcagccacctccttccacctattattcagcaggctagggagttctgacggctaattcccatatcctctgagagcattttatgaatgtcctgggactttctttgagtcaggtcctcagacgtcagccgggcttccactcttccggtcacagcacagtggtgggatacacaaaccatgccagatcatccatgcagagagcatctctacaggcctgcagttcttgtgtctatggtctggaccatcttggggagatgctgctgtgcctccagcctccagcttatgggccccacgttagcttagccctcagcccacagcctcacattcccagggcacctgagacagattcccacaggacccagccagcaccagactttcctctccacaggctagtgactcggacctcacgcctccaaactttcggtttttttccactaatcaaaataatccacaagcttcacatctcttaggaaaatgccccttttgtaggttctgactagtgtttgacggtgaaagggacagagaagcaactgctaactgtgtgtgacagagggctttggggggatcacattaatttatcccttctctcactctgagtccctaggatcaggggcagatggaggtggtggaagctcacagtggctctttttatcctagggagtccaggggtactatgggcagccgggccctctcccacgacagtattttctttcctgaatcgggacaggaccctgctcggcccgtgcgggtgttctcccaagaaaatgtgtgcgaccggatcaaggctttgcaggtaagggttcgcttggcactctcactgggtgtctgtccagtgttaatctagaagtttctaagtgatctcagcttagcattttatacagttgaaagtcgggtcacaggttcttcacgggtctcaggcatgcaagttagtcacattctgactcactgttggtgactgcctaaagaataaggacagtggtgagggagctggggacagacattcaggtcagggcactgtgctagggtgctgaagttatttcctgaatgaatgaatcagagcaggaagatttgttgctagctattgttgatgaaaacactaagaatggttactattccctcaatctagttaaagatacaatgtaacgtgaagatggggccaccgcctccaggaggccttcctatcaagcgggcagaggaaaccggcatgagttctgaggatgacggactgccccgcagccccccagagatgtccctgctgcacgatgtgggtccaggcacaactataaaggcgagtacagtctgtgcccttgaatatttccatccactcctgacactaagcattgatagaactctggaggaccctccatgtcttccagcaaggtctcttgagtgagggagactgcgctgccgttttgtgcggttgtgtggtcagtctgatgccatctgctctgtgccttatctttcttgtctgagcagatgcccagacccagaaaagaagggcaggggctccctctcctctgcatctcccctcccatggcagtggccagagcacaaagagaagagtaaacactgaattatattcagccctgttcctgagtcctgaccgcagaaacctgttggtttgggcgagtcacatgaagccctcagggtaaaggcagcccagggagtctgaccagcagtgtctgacctcagccactgcaggaagtgatcccaactgttgtacccccatagactccatttcacaaagaaacaccccagcatgttcatgggctacttttgtttgtggtaagaatgttaatgtacacatatatagaagacaaacaggatggccattttctccatattagtaagccaagcgaagggcaaatgggaatgatccaaatgatattgatccttgaaaaacaagtaaaaacagagttggtgtttgatagctgggcatccttggatcccgttcaaccctggccctgccagggcgttgtttacaatgtaactgtagagttaccacttctgggctgtttggaattgtattcggtaaccactcaacttaggtacatagagttccctcttcccagacacgagcttgttctttcttgtagttgtgagcacccagaatattagtaatggaaaatcaggactgtggtgtggctgattttaagtcagctctaggggttggcaactcccatggagctgcctagagtatgactcccagaatctggcctcagggaaacctatctctggtcacagtaagagtaggctctggggccagaggctaccaacccacacctgctctccaacttcaagaaggcctggatgatggggaaggttgccttactctgtggaataaaactatgcccgttagcaacttaaaacactcttgtgtacaattgcattgtcccttttcagaattagatatggctgtgtgtcaggctctgtttgtgaggcgatacctgtgaggagctacctgctggttcatttttgactttaccctccttcctctatctcttgagccttggactccagtctctgacttacagtagctggttctatctgcaattggctgcattgggtggggcggggtggggtttcggggagcagcttcatttgttgaagacagagttcaactccaaacccgatcaccactgcagtgcacaaattttaattagccaagtgggggtcacttgtgcaggggccacacttacctaacttttttattccaatggttctgactttttattttaagatgaactctgaggttgtaccagttattgggtagtataccaaatctgctttcatcgtgggaagccaacgtttgggaatggtgggtgcacggctttcattccaggaggaggcagatggagctctgtgagttcaaggccagcctggtctatagactgagttccaggacaaccagggctacatagagagactttagctcaaaaagcaaacaaacaaaaatgttaaccggacactaatatttaggtccagtgttccaatagagacatgcagataataattattattattatctttgtttgcatggttgtttagagatggtgggttgttcttggaacctagaggatggatcccagattctctctcttttgtactagttggttttgtgtcaacttgacacaagctagagtcatcagagaggaaggagcctcagttgaggaaatgcctccatgagatccagctgtaaagcattttctcaattagtgatcaatgggggagggcccagcccattgtgggtggtgccatccctgggctggtcgtcctgggttctataagaaagcagactgtgcaagccatgaggagcaacccagtaagcagcacccctccctggcctctgcatcagctcctgcctccaagttcctgcccccatttgagttcctgaactgacttcctttgataattagctgtggaagcattagccaaataaaccctcccctccccaacttgcttttggtgatggttcgttgccacaatagaaaccctgactaagacatcacacacctgagctgcatgcactatagcatagcatctgtgctttgcaggacagcctgccgacacccactccaagaagaggctcactgtattcagtggggcaggcatcttagggtattctctcagtcttccttctgtcacctggcaacgcatttgctcactgctgactgctagttcctccccgctgaggtgtaaactagtaacatgcctgtagctcaccatatggtagccgaaagccagactcctcgtgaggctgtaaagaccctttccaatgaacaaagtttgccagataagaggctgacagggggctccatgcttcctgtgacctgaaccctgatgtctcactgctgggccacatgccaagcttgacaaaaacagcaggttcctccacccctagagacactgggctagtctgttttgttggttaaagtagctatggaaagtcttcctgtgaagaggagtggcctcagggttgtccccaccctttgacctcccagtcatttgctctaaagcgatagtcttaaacattccccaactgaaattccccaattgaaaatactctgctccaggtacaggctagagagcccagacgcacaccaaaggggagctggtaggatagcagtctccatccttgtcactaaattaatgcttggtgtgtttgtcccttgtgacacgaagatcctagtgtcctcgtcccggccacagtctcccgaccacatgagcgatgcctccatctcgtctcggaccttggatggtagcctagctcctgtggttgacttcagccaccctccagaattctcttcctgcctggacaactctgcagctaaacacaaactcctggtgaagccccgcaaccagcgatcaagtaaactgaggcggctgtcttcggtaatcggccttcctcctcagtggagggatggggtgggcagacatgacagtcttacctgctgcctgatagcccttctgagcacctccatggtgggtaagatcacactgcagatgctagtttgctcatcttttgcaccttgaatgggacatgtctcccttgcataaacaccctccttagacattaatacttgcatggatatgttcattccacaaacaccaagaatccacagtatcgtgtgccaagcctgacaccatctattcctggactccttttaccctgacggggcttagatccctcagctctagagaaggtgggggtggagggctgggcaagcgtgccaaggacaatggctcacactgaggacttacagagtaacaaccttccctatcctcctctcaagacacaatcacagtgttgaagatttcatgacaagctaaagtgcagacaaatggcagggcccacttgtgtttcaggaacttcctgaagagagtgagttgtctgtttggcaaatgggagttctagtctggtgactggaagagctgccaaaggttatgacccagagctcggacagagacgacctcccctcagccctctgtgctgtgctgctcatggcttggcagcttcatcttcccggggattactgtatgttgtaccgggtacttcctaatgacgcaggggcagggataacgctagcctagactgattctacatcttggtacaagctaagcatttctggttccagagtgccaaaccatttcaatgcccccacaggaggaaatgcccaggagattatctagatgaagtggacacagtgatcctgtgtcctggctgtgatggagaggttgagctccttcctgctgcagttggccagaggtactaggccattcagaaattgtttttctaccctttgggctctactcagcgtccaagtactccctctggagagcaaacctccatgccagccttcatcctggtttatcccgcatggttacctcttggagctgctggtagcagtagcaagaacctgcagcttttgcaaaccaaaccaaaccttgtatagacttcttccaacaacttcttttgaaatccaagagaagagaattgtgaattttggcaaaacttagcttaggtatggtcacaaacatcccagactttagcaagcagatgccagctagaaaatgtttaaaaattacagctgggcatgttgctcggggttagagcatgtgccttgctgtacaaggcactgggtttggtccccagcatcacaaacatcagcaacaggaaccaactctaacatgcccagggtcacctttcctgccataggacacagaacaacagagcactgtttaatgcaacgccctaactgatgcccaaggtccaatgtcatgagcattttcaatgagggcatgtctccggagagcagtgctgtgggtcttggtgctgagcccaggatcagagagtgcctgttcacctaggaatacctgccagcgtaagttagctcagtcttgaccaaaacttccatgcctttggactgcaggctctccaagtacaaagagataataacaagcctttccccactcagatacatctagggtaaaacaaaatgatcagagaacacaacacaaggcagatagctgctccttcttggtcctcgggtctctatttggctatagacgggcacccatttggacatatgagttgctggtttttttgcttggttctttttttttttttttttttttttttaaagacaggatctcactacatgtaactctagctgccctagagcttgacatacatacatacacatatacatttacatatttatattgctttctgcctccctagtgctgggattaaaagtgtgcagtaacatacctggctgcatgagttgcatttaggttgaggtgctaccaggggccgtgggtcagctgcatttgtgaccaaggctccgtgtaaactcataagggcagctgaagagcatgcagatatccacttcagcagcagccctatatccacttcagcagcagccctttgaggacgactgtgtcgcctgaaccactttagccctcgaggaggcgaggacgggccaggttgtctaacacttgttgcctcgatgatatctctcacctctgtttctctcctagagggcgcagtctgagtgcctgagtgacctgtcgtggaccctagatgaggaagactatgaggagaagccattgcttcatgtcagcatggaagaaaccccggacgctaggcagcgggatttgataccaggcagaaggcctgagtttgggggacctgcaacctttctgtcacctgggggggcctgtgccaggcgtgctcgcctacagcacagcatggcagtcagtgccagcatggaggagggaggctgtcctagagatgaaccctcaagccttccagctacgccagaagttactgagcccatggtggtctcagtcccaagcttggagtccccatctctgccagaaagttctccaaaccatattctccatagtaagagccagaaggaagagctgtcccctggaggcctgtgtcccctagtggagagtacatcagaggaggctccttgtggttctggagttgcagaaacccctctatctactgatgtccctgagagggacatgggaccttccaaggagggctctgcacctcctgagggagacccagcattttctgaaagacacatggcattccctggagggggtagcatacctcctgaaggaaacacaacacctcacaagggtgtcatggaacctcccgagagagacatgtcaccttccaaggacaacatggcacctcccaagaggatcatagcacctccagagagagacatgttaccttctgagggagatgtggcacctcccaagaggatcatggcacccccagagagagacatgtcacctcccgagggagatgtggcacctcccaagaagatcatggcacccccagagagagacatgtcacctcccgagggagatgtggcacctcccaagaagatcatggcacccccagagagagacatgtcaccttccgagggagatgtggcacctcccaagaagatcatggcacccccagagagagacatgtcacctcccgaaggagatgtggcacctcccaagaagatcatggcacccccagaaagagacttgtcaccttctgagggagatgtggcacctcccaagaggatcatggcacccccagagagggacatgtcacctttcaagggtgacatggcaccacccaaaggaatcatggagcctcctaatagggacacatcacttccaaagggagacacaccacctcctgagactatcactgataccaacttggagacaccttcagatacagagagacaggaccaaagtgtccagaaggaagaggagctgaccctggtggtggtacccaggcctgagggagtggggacagagtcttccacagcccctgccccaagccctccagtacccaagagctgcctgaagcacaaggccttggtcaccagtgggtcccctgcagagtctcctctgaaagagcctggcccagcagtccaagacaaagcagttgtgcctcccgcccgccccaggcctacacaggctgcaacctcaggaggtccagagagaacagccctggggagaaagaacgagcggagtgcagagccacagcgcagcagcgttaagaggttttctgtgacctccagcagggcacgtgcccgtgtcagcggctctcgccttccggagtattctgcacatgtgcctgcagggggccgagcacccttgctgcggagtggccttgcctggaagagtgaggcagcacttgacgaccttcaggtgctgccaaagccacaggaccggaagacaatgggtggtgaccctcaaaactcaggggatgtgggggccggccaggcaggaccgggcaagagcccccaggaagctgagccatgtgcctcctctgtgcaggagccagccaatggggaggaccagagccccttcccagtcaagctgcggtccacctcactctcacttaaatacagagacagctctgcccaagaggccaaagccatcaagaggtacagcgccgaagtcaggttggagaaaggaggcctggctctgcttcccaaagatgaacagagccacgtcggggcagctcctgcactgcgaggctccaggtcccccaacgggcaagggaaaggaaagaccaggtctcctgagcagccgggtaccaagccacccctgcccaggaagccacttctgccgagccttaccttgccatacccacccacaggcctggataccagccctggggagtctgagagactcataccggtcatcctgcctcccgagcccaggaaggagaaattgtccaatcagggagctggtaagagccttctaagatgtttgttgttgggaatagatgggtcacagggaaaactgtgttgctgggatgggcacaaaacctgcaaaatcagaccttagtacaaagagaaccgaggaaaaggtcaaattttcttagcactgctgacatttggaaagttgggaagctgaggctgccgctcttgcctgcacaggcccggggttcaatcaccagcgtgggaaaacaaaatgatggagtcttaggagttgggggccacagcgatggctcggtgattgattaactgctcttgctgcccaggaagaggattggagtttggttctcagcctaatgctggctcacagctaactgccccgaactccagcttcagggcttctgacatctctggcctctgcaagcacctgggttcacacatgcacacactacaagcagataaacctttacatatagataaacataaatatttcaaaggaatcagaaattatgaagatagatggtcaaacaccaggcttttgtgtgaatgcagaaaaaacatatatgttgacataatagggcaacctggaatctaatttgtgtactattcccgggttctaaatgggggatacaaatgcttttactgtatgtctcagaaagccaacaatgtgtgtgctaattttgatgcaggttttctctgggactaatctcctgggttgtgagagttctttttaacttatttccccaaggaaaactttcttcccctgtcctaataaggcctctgcatggccccatgtggaactcatactgtgtatgactggagtcagaggaaggccagcctttacttcctgtcccccaagggagatgatgttaggtttgggacttggcttaataacctttaaaagaaactctttaagatgaacagggaaaaagtaagatgagttgtatccctctttgatttatttatgatgttccatatcaaaaggaatctgttggaagtgggtatttgcaactcaattaaagagactgcttattgctggcttatgttatttatggaaaataagactatacaactgttgggtcctatgtgtgtgcacgtgcgcatgtagacatgcacacataagcacatagcacacatatctgtgcctgtaacaggaaaattggggccttagcaacagtttttccatggcagattttatttaaaaatgttccaggctatttttaagtggctcttataagaccaggagtccacttgcactgcactgtgggacagagaggaagccaggcttggagacttgcttgagaagtaaagaaccatgaaacaaggtttcaatgatgttgttcaaggcaacatcatcaacacaggttcaaagataagctgatgttctctgtgtccatagaagatgttagaaaatcatggcgtggatacagataattaagttttgctattcattaccttgttgtggcagggactctgcccaggtttacagatcataaagtaagagtatccaattgtccttggtgggtgcacagctctaatctctgctccagcgactccagctgcattgtcccctgcactgatttttttcttgcccttccgcaccctgtgttccctctgaagggaaagaggaaccttccgtcagtgatgcgggcaggaggtgtagggattattgtaacagacacaggagcccagtttgccaaaggggctatgttaagtggttacacaagtccaataccgtgtgtgtgtgtgtgtgtgtgtgtgtgtgtgtgtgtgtgtgtgcgtgtgtgtgctcgtgtgtgtgcgtgtgtgtgctcgcgcatgcaaatacactcctcagcataaagaaggcttatttatagacctgggccacaatttgctgatttgccatgagaagaaaattgcctatggttagccagcttgttcaatttccaagacactctccttcctcctgttggtccagtgcatctcagagtctaaattacaggtcaggaaacaactttccacacccataattaggcattatttttagaaggagatagtgtcatgttttgaaaacgtctaaaacacacacacaccccatagaaaaagtttcttgtgagccaggtatattgtcacgtgcttgtaattctaactacttgggaggcagaggcaggccagtggcaagcctgaggccagccactgcaacctggcaatattctgcatcaaagtaatgtttttaagggatagagaggttatctcatggttcagtttgctttgtatcattgtgataaaacaccttgaccaaggacaacttactgggtttgcatatcctgcccacagcccatcattaaggaaaatgagataggatccaagcagggcaggaactgggagtaggaactgaagcagagaccgtggagggaaagctgtttctcgcccagcttccaggctcatgttcagccacctttcttgtaactcctaggaccctctgcccagggctggcactctctagagagagccaaaccctctggatcctctcctatcaatgcccccaaagacatgcctacaaggccaacctgacggaggcagtttttcaactgaaagttcccccttccaagaaggttctagcttctctgtcaggttaaccaaaaactaactgcataccacacacacacacacacacacacacacacacacacacacacagagcactggcttcagtctcctgggccgagtttgattcctttgcaggaatgcccatgtgcatcttgaccatttttctgggttttgttttttgtttggtttgggttttttttttttttttgaaacccatttctgctcacatttatgttttctttcagccttccctcctcaatgctaccctaagagaatctccatgccttcccgacagacatggagtagagttgtaactcctgggtcaggcactcaaggctttttagattagggccagagtcaacagttcttcgttctcaatctctttgcctcctttcagcccccctccctggcctcccccgacctgtgagaagcacacaactaccctgacgtgagcaacatggatcggaaggatttgcttgccagagtcacttgagtttctcaaactctgagtgttatttctttgcttacaaaattaaggttgttgttaatatgagttataggaagtaaggccagagagtaggtagaataatcctatttctatatccctttggtctgggctgctaccagaaggtgccacccatatttgaggtgggtcttcccacatccattaaggccagtacgacaatcccacaccaacttgcccacaggccaacctgatatagacaattcctcacttgaggaccgcacccccacccccagacgtttctaactcaggacatgttgacatttaaagccaaccaccctggactttgctccatgaacctctggtgagcatctgaaaaaaaaaatcaactctgaggagagttgtgaaggtccttatgaatgccatgtctactagagtttgggtcttgaatgtccctcaaagccccatgtgtcatgtgttgaagacttggtcctagctcatgagcctttttggagacaaaggaacctgtggcagacaggcatccagggaagagattaggcaagcctgtgaactaaatttgggatcacagtcccttcctgtcctcttttgcttcctggatcccataaaatgaacaggctgtcacccgcttctgctggcacgtcttttgccatcattgatccaaagaggacagtccttttagagatcattgcatttgggttatttgatatgtgtatatatgcacttacagacaggggtctcacactgcatgtgtaggggtcaaaggacaacttttggaagatagttctttccagcatataggtcatgggagtggggtggggctggggggtgtcccaagtcaggtcttcagggttagcagcaagtacctttacctactgagcaatctcactggctcgacagccttttcttcttcctttctttggggtttcaggactgagagaagtcaggcagaggtcaggctgtaggtcaggcagaggtgagtttctgagttgagggtggaaattaaaaccacaaaaagtcccaggccacagaggtaggtcaagctgtgcctcttgacctgaaaggaagtcacagggtgagaacaagatggtccttttggccttacatgtggctggggaagaaaatttggaagtgatggatgtcttcctgggagctggggagtggagagaggggccaccatcagaaaggcaagtggagggaaaccacaagggaccttggaggctgaaggggtaaagagaatgagaaggagctgccagggagggacaagacttcccccagagtcccttgatgcccttcttgaattgtggaaatagctctcaagcaaaggcctgcctcatccccctctgtgggcagggcattagactcctcttcctgaccagtgttcagcagctaatgaacccggatgatctgtcagctctgtgttctcgtttgtatctacttttgtgtgcttctgtgtcttatgcatgtgtttgcattactgtgggtgtgcacatgtgtgcatgtcatgcgaacggtcagaggtggacgttgagtgtcttcctcagctgctcgccaccttgctttctgtcactgaacctgaaactgagttggttgagacacagctcagcaagctccaggtctcatcaagggaactcggattttctcctgccaactacatatatccagggagccacggaagcacctgatctgggggttgctgatgcgttttggcagggagaacatcctccaacagggaaatggtgagctttgggccttgattatgtgctggagaggaaatgaaggggtagtgggttcactcggggttggagctagtgcaaagctctatattatgtgctttatggaaaacccttgcctgctttcaaaataaagcctccggcaagcacaataacttctgttataagatcgccccatagctgctggacagaactgatggaaagccactaaaacccacagtgatattgaccaggagctggctgtgagccaggacagataacagattaatgaatgttttaagaacagagctggtcttatatgctgaaagcctaatgtaaccctgaagcaaacacaaggtgcggtattctcaggacacaaggtccacacctgccctggagcccccttagtgtctgtctgtcatgcccatgtatgtcaggactgtagctgggggcctaaaaaacaagcagataggaccaaatgctgttctggcttcaaccacttgagagacatggttgctaataggtccactttagatcagaagtcttattgaacaaactcaggccttttcttccccggaggaggttttaattcctggaaatgagctgtggatatacatttttacaatggcggttcaggggctgcagggatggctccagttaaagcatttgccacacaagtgtgaggacttgagttgacttgagcccagcacccagtttcttattatcccagcactgggggtgggggacagaaaggaggccctctggggcttactggccagccagtctagctgtattattgagctctaggttaggtgagtgtcccaatctcaaaaataagggtgcatagagatttgcttggtgacaatccctggccttcacatgcatacacgcacataaacttgtgtatgtactcatgcacacatacaagcacacacatgaatatgcacatgaaagtgtacatacacgtggatgtgcaagcacacacatgaatgtgcaaacacacatacctacacacatacatgcatgcatgaatgcacaagcacattcatacacagacatgctcacacacaggcgtgagcacgctcacgcacacatacacacacacacatacatactcgtgcacacagttgcttcaagaagcacagcagtatgctgccctgttccaagcttgcttagaccagaacatctgctttaatatctcagcccaagagcgagagtccctaagttcacatcctccagctccttgcttcccaaccacaactgtgttcttgacagctctaatcttccgggctcagccttctgagaggtgtcatgcagggtgtggcttatcatttgtgcttcactctcagtgggtcacttctaggattctttctggaaaaacaaaacaaaacaagcaagcaaacaaaaaccagtgccttacatttgaattttagtaggcaccaaaaccaagcaaagggggtgactccgagtgatagaaagtgtttgccacctgtaggtggagcatcccaggatcgggtgagtggttaggacttggggggagtggtgtcttctaaatacagatagctaagtcacataagtccacaagctaagtccataagcccactgcattagtttccccatcttttgaaagagattagaaaacagaaatcagcaaaatggttgccttacgttgttaccagcaatgacagacagagtagcagtgggagcagctgaggcccagccagtggtcttctacacatatcgtaatggagaacagctggcaggtgccaggcactgtgctggggcttggaggaggatgacgtcactgaatctttacaaacatctggcatagatagcaggttgtcttctgggatttttacacctgcatttacacggggtctgcccaggagcacacggctagcctgaggcctgaaacccagccccaggacaggctgtgttgaagatcagtgctttacagtattttcccaaatagagcttgagggaagagactacgctactgaggagggaggggttttgttcctttgatggactcctctcagtaactaacaaagtgatagtttcttctgatcagaagtcacttgcctgtgcaatggggttgttagggcccagctgtgtggctctccagctccccacacctgaggcccttgccatctggaagtgttagtctgggtttgttctaaggcagattagattgctcccttcccaggcaggtgtggggagccagctttttctcaaactctcagcaaagggatctcatacattccaacacgtggtgtctgctgttcagtgagagacttgtcgagctctgcaggtgttggctgcagacctgggtacacttgacaacctaaagcccttattattccggaggaggggctgagatgtcagaaatctttaaaccagatccccaggagactcaggtctgtctattgaggccggaatataaacaaaggagtggctttatttgccacatctgccgtgccctagagctgaccttttgagcagatctaatcgcagaagagattttatgtttcaaccttggccctgagagttaatgctttaaggggtcactgacaacctgtttgcccgccccctcaaggccgccatagactgcccactgcccgtcttcattcctctctctagccctagccctccctagcccagatggagcacagacgcagagccgtgggttccagtgtggcagaggataagggtgcaagtcacagaaaccactcaggcctgtgtcacagagcagaatgactgtcacccgactctgcccatactttacttgggacagaggtgcaacatctctgaggcttgatattgtgagatgtgtccaagtgtggggaaatacaggaaccaaacaggaaagaaatggctgctaagaggtcttggtcacttgctcaggccagtgctccatgaagttgcctgtaggtcacctcctggcacagcctagtgcagttgcagggttcacccactcccagggtcagcatgtgaacgtaggtacatgggcatacatcagtgcagttggaaacattgccacttgagcagtccccagagccccaccctcccctgggggtcccttcttgccaaaccaccttagaggcagtctcatataacttttctgctcgtttgaatgtttttaactctacgtgtacaagtgtttgtgcaccgtgtgtctacctaccgatgccaaagaaggcagcgtgacccgaggaaccagagttacagatggttgtgagccacatgtggatgctgggactcaacctcaggtgctcaggcagagcagccggcactcctccctgggccccccagccctcctccctgggccccccagccctcctccctgggccccccagccctctttatgctcattttaaaaatgtatcttttggctcagatgaaattatccaagtgcaggttataaagaatttaccagaactatgtcttgtgcctttgggctaagaggtgacagagtgctcagtacccagcactgagctttgaggaggtgagagaggctggcctggccttcaacaagctacttctctgctctgatttcaaactggaatggcaagttcctcgggttgtgaatttaatcttatcagaactgttcgaggaatatgttgttagccaagaaaataaagttcaaaccctgagaaaatgttccgtctgtttcgaagagagtagctgcctctgggatagggatgggagtgagggtgagacacaggaagagttctgcgggagctcctggtcactaagtgaagaaatggcaggagagggcaaagagggccctttaaaagaatgtagagcaggagaagaaaaacagccggtgttaaccatgcaggccccaacttcctgtgtcaggtgaagacagatggttgtagaaatggcatcacgtcccacaaagggaatgtttttagcgcgtcaagtaaatccggagtgggggcgggtggctggtcccaaatgtagactcttatcaaaggcatcctatctgtgcatacattccagctcctcccagagagaaggccctggtagaaattagctccaaagtgcacaggttggggtggcagctgcatcttgtggttttggcggctcagaccagaggaggtaatctatttgagacatctatagaagaaaaaaaaaaatgaagtttgctgaagagaggctttggctcaggggggaatgggaagtgggggtctctctgagactctactcctcaatcctaccactcctcagccccctgaaccaagcaaagcaatataacacaccttgtatgggagagaagctgtgggtgggactgaaggggagagtgggactatctgcctaacattgctccttcttggcctttatcacagaaaagggtcagcctcctgcggctacaggtcctggggctgatgggcaacccaccccaccctggatcaccatggcccggcagaagagaagaggagccccagacctgcccgtcaaccaggaagagaaacctgggtcgaggatcctaaagacagaaactgggaagcaagccaaggtggccgagagagcccaggttaccactctttttctgtggcgttcggggtgggggtggggtgaggagggcagcgatcttgtgagggtgtggtgggagcaggtaccgctgtgctcacagaggtcctgcatgaacatcacagagatgccgtgcctaccgtgatggctgacatgcgcaaaggcagtacgtcagcttgtggaccccgtgatggagctagctgcctctttgcctgtgtgggctggtagaaatgcagtggcgcccgaggctgctctggcctcctaggcaacgcagctcagctctggaaaaaaatgaagacagttaaaacaacggctcnnnnnnnnnnnnnnnnnnnntggtcaccagctccaccctcagccccttgtgtgatgataaatgaagcctgctctggctgctgcctgctggcttcccttttccctcacctggggctgcacagccaaaacctggagttgcatgttgtattcaactgaaaacagctctcaccaaccccaacaactgtgctgatgcaccctctgctaaccagtacaataaatggggttctgctgtctaggaaagggagcctgcgctgcaataggacctgcttcccttcctgctaatgcaatcctcagttgtgtctacacagctgaagacctgtatgtagcattgaggaggggaaattacagtgcgaaatgttagcccatttcagctgctgccatatagtgtgtatcataaaaccattccctacggctttcacatagagtcctcgctctataccatctggggctgagactgggctgtccaggcaagcaaggagccaccatgcacacgtgggctgcaggaggctggcacaagtcagctctggcattttggtgggtgatgccggtgcacagagcccctttccagaaagtgccagcagcagggtgcatcttggaagagacattttgtagctaagacacttggagtatttacccactctgagtctgttatccttgggcagcacctgtcattttgtgtctccgtaggagtctgtgaagcagggtgacttcgtccggagcaaatctttcctgatgacccctgcaaagcctgctgtgacccagaggcaggggtcaaaactgaacctcaaggaagggctacagagaggaatctcactgtcccatcagaacttgggtatgagactggcttttatttccaaatactttggcacacactcatgcacgcgcacacagatatatatatttacacatacacacacacatatatatatttcttcctatgattggagtttgtgttattgaatcattttgccatgttgagcagtgtttttttaatgtagtccccccccctttttttgagaaggaatttacatgagataacggtcacccatatccagtgtgcatttcagtggatgtatttaacggtgagattatgtgtatttgcggagtcccaccaccctggtagcaatctaagaatagaacatccccctcacactggaaggaaacctacttgtcacattccctaccctgggggtaggtaagcactaacctactttgtgtctctgtgagatatccctttttgggaatgtgaaatcataaaacacaggtccctgtctctgctggttttgaatgcaattctgagctccgggaggtggtatttgtcacctcaaatggtggatgagcccggagtctcctgcacactaatcacatactctcccgtcgagtgacatcccgaacctaatattttttaattttttatttactttgtattgtggtcaaacgacacgagacttgtactttactagccatcttaattgggtggttgtgaaggtggtatgctcggtccctcgtgcagcctacctctggtgttctgcagttagaccctgaacctttctagactcactttgcctccggaaccacctaagcctgctctgaaactcttccaatcgtatgtgctccacactcgatgcttcagtcttcactcctttatgcactgagggattgtgtgtcctggagcacagtggagactggaacgtatatttaaagctataggagaggcttagcgaaaacccacactgggtctcttgcttttgtctgttttgtctcccagcagctcaggctgcagcgaccacagagaaggaacttcatcagctgaagagggccagttacgccagtacagatcagccatcctggatggaactcgccagaaagaaatctcaagcctggagcgacatgccccaaatcataaaatagattggcaggctgctggggaaggaggtccactggaccgacgagccacttagttttaaactgccaataaatcttggcaagcagactgtgaaacttacgattgatttttgtcaacggcttctgatgtgctccgagaagagagaggaaccagggggaacggagaagaccagcagacagcctcagtgccgggccagaggggctgtggcaagaatgttgcgaagtttaggggcgccattcctgtgctgagatgtcagcgtgagcctacgagtcccaggtctgcgctgcctcttgccatcagccagtgcctctggccaccgtcttgccgtgggccatcgtggtctttcttgtttactaataggcatgattgtttgtggtaaagcagggattccctttacaagagcagctacccacttaacaatccagtttcctgaagaaacccacccaccccgagaaggagaggaagggacgtggcagggtttgtcaattcatagactgtttccaaaaagaatttttaaacttttccactaggcatctgtgtcctgtgcaaaatgcattgcctgtttaataaaaagtttcaaacatgtttctgctctgtgcgtcaatattatttttgctcctagagaacatcttccaatgctgagggaatgcccttacgcctcagtgaaaatcctgacttggttgggagttgagtttgttgtgtattagcgaggggtgggtggtggtggtggtagggagtggttggtttttattgttctaacaaaacattggtgttcattttaggaagaaagaagaatttgtaggatttttttttcatttgctctacatataacattgcaagaatatgaaagtcttaggggccgtctatcctagtttgctttccagtttgtttataaacatcataaccaaaagcggcttgggagaaaaggtttatttgagctgacacaacccaggtcacagtccactcagggaagccaaggctggaactaggagcagagattgaaacacgagccacagggaaatgctgcttaccagtttgttccttgtggcaggctcagcctgctttcttatacaacacaggatcacctgcccaggaatgttgccgcctgaagagagctgggctcactcacagagaattcccttacagacttgaccatgtgttggctaacgaggcattttctcaggtgaccctggcttgtgtcacgttgccaaaatacaataagtaaatctaagcgggacactattgacactttatggcatttcacccatccagcctgcatatttctgttgacaacaggctcgctggtacaacagccaagaatgtagaatgtggcaaaattgggctggaagaaaagtttgggatctcagaggttctgtgcaatggctccttagcagttgctttaaaacaattcgtttgttcctccccacaagccagtctctatgggagttaattcagctagacgcaaaatcagtccgacctcatgatatgtttgttctattataacttgattttatgtgtcctaagggttgccacttttagtctatttttccattctcatgaaaattcttttcctagctgttagtgctacacaattttatggcatctgcctctgccgaaggagtgtgggacagtttctttccacagacaaattgatttattaatgacattctcttagagaacataaatgcaagaactctaaagctttggcctgaatagttttaactagagaaaaatcaatttgtctgtatttctctggccagcagagcatttcagaggaatgctttggaggcagaggcctcactacaggaacaaaaagacgtggttcagttttgatttgactgttctctgtgtttcagggtgtggtacacagcaggcttaggtttttaggacataggagaattcggtaggatggagtcctatagcctctgccctctgcacggagattaggctctgatagaagacctggaggccagccaagcttggccagccaaggctcggtggtgatgtagaagtctacagtggtaacaatggggaaagcgtgagaggagtcaccagacccagttctcctgagcagaaggaacgggcattgctgggagtacattagccactttagttacaaccctctcttccgtccttggggtgagtatgcatttctgctttgtcgatgaagtcgttgaggcacgttgaagctaaggccattgacggcctacgtttttaaaccctactgtaaattgatatcttagttagggttttactggtgagcagacaccacaaccaaggcaactcttattaggacaacatttaattggggctggcttacaggttcagaggttcagtccattatcatcaaggtgggaacatggcagtatccatgaagacatggggctggaggggctggaggagctgagagttcttcatcttcatctgtaggctggtagaagactggcttccaggcagttaggaagagtcttaaagcccacacccacagtgacacacctactccaacaagaccacacctactccaaggccacacccccaaatagtgccactccctgggccaagcatatacaaaccatcacaattgacacccctggttttgtttttcagagctgagacctaaacccttgtgcctctaggcaaccatcataccacggagctgaacccccaaccctagcattcctgcttttaaatctcagtcagtacaggagtgaaccttgccctcagagacatcatgggagcacactgagcatgaccttgtgaactcgtgggtcttaggaacaaatgtgtacaccacgctttctccttggtgaccacctctgtctttgagttcctttaaaggataagagaatgtgctggctttttgttgttgttgctgctgctttaatttggcacttttaaattttcagtgcacatgtacttgaataatttggcatgtttctaacttgtgtgggagttccctagaagcatctctacgatggggcccaaccccatgaaaactctatctttgtagtgtgcccactttttcataggaaagggacacaatgaatagacattaagtatgcaaaaatcaaggaaaggggcttgttgggacaacagagcctaagccagagactggctgtggctgaatgagttcttgaggttggggtagggggtggctgatgaggtcatctaatcaaatggctgatcctggctagagtcatggcctaagtgggtgcgtttgatgtggcgtgagaagcaaagaatggaaggcctttggctggagttcttggtccatacagaaagcatttacagaaatggggcctgagagggaaacccacagaaaagagggcatcttccagtgtgagcacctgtggagccagtaaatagatacccatgtccacagatttgggaggtctcagtttgaaacaggacagaaattcaggtctgaaagaggaagagggggctcttgggactgatctaaaaaggtgccctgattctagaggtctggaaagagcagatgtatccaaattgtctttggagccaggcagtgggggcacacacctttagtcccagcacttgggaggcagagacaggcagatttctgagttcgaggccagcctgatctacagagtgagttccaggacagccaaggctatatagagaaaccctgtcttgaaacaagcaaacaaaaaaacaaaaaaaccgattcaaattgtctttagaacaagaaagaggcggggctgagagaggaaagggcagggtgttgagaggggagcgtgcagccgtccaggctgagatctgctggatgacgatggttaacggacaacaagagtggctggtggctctgggcacacagaagccgtaggtgacctgggtgaaaggccttttaaggtactactgaggtagagcaagccttttttttttttttttcatgtccactggctgcctccacctaaggcggcgtttgagaggtccgcattggttgtgaggaagttaccctctgggatagggtgtttccagaagggagaataggtagagtgtttagaagcaggccacaagcataacatgttcttcaggacaacctccagagacaaggacgcagtttccaggaaataaggctgttttctggagcagacactttagagccatttatagttaagggtgtagctggggtatagcccaatccttgagaaacagatgtgtaatcataaacaggattgaacccagtttgtctttactatgaaatggctcttaggcctaagacagaggcaggctggttcatcactctaacagcccacagccatctgtggtctcctcaccttaagagagctgggtacatccataaggatagcagtgcatttcatgcttgggaaacccaatgcttcctccataattcttgggcgtttctgctctctcagctctgttctgtgcttgggacctctgtagatttttctttaatgactgttgctgtcttaacccgaaggtggctcctttgacagtctgtagaattccatgtgcacatgtcattcccgtgtgcctgtgtgtgtgtgtgtgtgtgtgtgcatgcacgcacacgtgtgtaggtacaaatgcactcgtgtacacatagaagtcaggagactccatcaatagagggtatcttcctttatcacttgtctgtcttgttctagactggaggctgcctacacagcaagcttcaggggggctcctgtctctgctcccttccccagctctgaattatgggtgctcacccagccccaaacctgacagccttcatcttggtggagtccattaatcgggtagggtggcgtcacagttttgtgggtgtgaggagacacagctttctttatcttcctggtcccatagttccagccacccacagcaggacaaatcacccttggttgtctcgagagcatcagtccatctacacacacaacgctccaagtaattaacagagagcctctcccaaacagagggcctggtctcactgacaggcgtcatgatggatggaactttatcctttgactaatgctgaatggcgggcacccacaacaagatctgcatgtcctaagtgaggccagcatgtactccatctatctgagttgtcccatttctcaaaacagtctttgtacaagaccgaccgactgtcaacggccctgcagatttccctgctgtagcttctagtaagcttaggactgcgggtcttctcttgctctgccagctgccagcttgaggataagcaaggcctcctgtgggagttgggggaaggatgagtgtctgttcagtcggtgagaggtcaatgagaagaaactgtgtgcagcaagtccgagggtccctgatcagtgcgctgccccgtgactgttgcgcagccccctggcaaggtccacgcccnnnnnnnnnnnnnnnnnnnncgggccccctggcaagtccacgcccccctgacaagtccacgcccccctgacaagcgcatggctccctgacaggtaagaggccctctgacagcttgtgctttagctttgcatcagtctggaatggaaaactgggagtgggtggaggtggggtgggaactaagtggaagatattctttatactggagcccggaagaaaataaaagttggcccactttttatggtaatcttaaaataaaaagcaaatattttaggctgcagatttaaaacatgcccacaaattcaacaatcctctcttcaaagtgtggatcatcctgactgctcacttctagttgcagcagagtcctctatccacagggaatttgttgtaagccccccaccaactgatactagtattaatatgtgtgttgtattcgatatgtgtatatctgcaataaaccaggaccatttaacttgatggaagtgctttgtagcatctctttagagtgcctgaattgctggccttcctacccttgcactttgggacattttcttaggtaagaggtaagggctttgtgtacacagcactgtcatatcactataattcatctgataaaaaataaagctactaagggcctggttgtgatgacaaacccagttatatgcttgcccctggacaggcagaagtatcaagggatcattcatagctcaggcgggaaggagccgggtcatgtagaacgctgggagacttctcattctgcttaaaaatagaattcggaggtggaatagtagatagagttggcaaataataataataataataatattccgtaaaaaccacatgcaatttagatctctagaatttcctgcttgctattggcctgaggttgactttaagcaagtgaaactgtgtacaaggggaagcagtgtagactggagcagaagtgggctggggacatggccactcggttaagtgcttactgggtgtcttagtcagggtttctattcctgcacaaacatcatgaccaagaaacaagttggggaggaaagggtttattcggcttacacttccatactgctgttcatcaccacggaagccaggactggaactcaagcaggtcaggaagcaggagctgatgcagaggccatggagggatattctttactggcttgcctcatctggcttgctcagcttgctctcttatagaacctaagactaccagcccagagatggtcccacccacaaggggcctttcccccttggtcactaattgagaaaatgccttacagttggatctcatggaggcatttcctcaactgaagctcctttctctgtggtaactccagctgtgtcaagttgacacaaaactagccagtacaattgaccccttgtcaacttgacacacaaacacatcattagtaagcctcaactcttacaatcttattcatccccaatatctaaataactttaaaagtcccacagtctttacatattcttaaaatttcaaactctttaaaatgtccatctcttttaaaatccaaagtctttttacaattaaaagtctcttaactgtgggctccactaaaacagtttcttccttcaagagggaaaatatcagggcacagtcacaatcaaaagcaaaagtcaatctctaaccgtccaatgtctgggatccaactcacgatcttctgggctcctccaagggcttgggtcacttctccagccaggccctttgtagcacacacgtcatcctctaggctccagatgcctgtactccactgctgctgctgctcttggtggtcatctcatggtactggcatctccgaaacactgcatgaccccttcagtcctgggccttcaattgcaactgaggctgtaccttcagcaatggccttccatggcctctcacagtgccgagcctcagctgctttgcgtgaccccttcatgccttcaaaaccagtaccacctgggtgacccttacatattaccaagtcctgctgcagcaggagtacaaccttggccatctctggaacacagcatctttgtgctttcagaaaacacttcccagaagatgtcacctcaatgatgctggtctcttcttaatcaccgctaatttcttagctccagctaaccagcatcaatagtcccagtaatgcaaagtttttgctttggtagttctggtatcttgttaatcacagctgattcttcagccccagctaaccagaactacagaatcttcacattcaaaacagcaatggccctgaaaagagtctttaattttccctctgaaatttcacaaaccagacctccatcttctgcagtgttctcaacattatcttccaagctcctacacaacatctgacagagctcttaacaacggatggatctttaagcccaaagttccaaagtccatccacagtcctccccaaaacatggtcaggttgtcacaggaataccccactctgctggtaccaatttgtcttagtcagggtttctattcctgcacaaacatcatgaccaagaaacaagttggggaggaaagggtttattcggcttacacttccatactgctgttcatcaccacggaagccaggactggaactcaagcaggtcaggaagcaggagctgatgcagaggccatggagggatattctttactggcttgcctcatctggcttgctcagcttgctctcttatagaacctaagactaccagcccagagatggtcccacccacaaggggcctttcccccttggtcactaattgagaaaatgccttacagttggatctcatggaggcatttcctcaactgaagctcctttctctgtggtaactccagctgtgtcaagttgacacaaaactagccagtacactgggcaagcaggagggcttgagtctgacaccagaacttacactgaaaagcagatttggtggcacatgcttgtaaccccagcccggaagaaaccccaacccagaagaggagcagacagatgcatcatgggactcactggccagatgtcagtcggcctagatgaatccatgagttccaagccagagagaacttgtgcaagaggttcctgcatgggtgttcgtgtgtgtgtgtgtgtgtgtgtgtgtgtgtgtgcatgctgctcctgctaaggccagatggtgttggcgatataggcagttgtgaaccagccaacacaggtgctgggaacataacttgtgtgctctgaaagaacatcaggacactgagcgaggtctctagccctatcgttgtgtttatatcatacaggttggggctgtttgctctgagggaagtcagccccgcaacttaaaaatgcacaacaagcccatggagaggccctgtaaggagaggcctggatgactcatttataggcctgggaaatcgctcctggaatctgaggcctccggtcaagcactgtcaccagcctggcgtagtgtgactaacctgttagcttcactgtcttgagacagtcgcctccagccctacgctcccaggtgaccacagtcagctgatgcggggattgcagtctcgtgagagttcccaggccaggctgcccagagaggacactgaaactgtgggaaataaatgtttttaattgttttaagctgttgcacctaattgtttcatgtagtaacatcaactaataagcacctttccgtgcccttgtctgggtgtgcttcagtttggtttttgactgtttcccaaaggtaggtacatattgaaggctttgattgccaacctatggtactgttaggaggtagtagaacccactggaagaaaggttattgatgacattgaaggtacattaagaccctaagctcttcctgtctctcttgcttctgggtggccatgaagtaaagtggcttttccacaatgtgcttctactctgtctaccatgtaacccaggctgccccaaaactacctattctatctcagcctccaaagtgccaggatcacagggctatattttagttcacgttgagaacacaacatgagaaacatgtaactaatacctctcaaactttaatctgctttagtcggcctgcagaaatggctggtggggtgcatcaaagaccaggggtcgcgttgcactgtgtttggctcttctcagaagcagaggcctcaactccagccacatcctagggcacatgtcttagtgagtgagttctaggtaacagaaagtgggtccccagagtgtgtgccccacagacaaacagctaatttgctagaaagatccatggaggaacaaccaggccttcaagcttggaagtgtttgcaggggaagcctgggggtgggagcaggtggggttgcctgggtcagaggaagcagaagcgtctccaccagatgtttaaaggaggaagaaagaaacaacagcagctagccagaaccatacatcaaaacccagaggggagagaggaagaagtgtttaagttctcagagttctccaacatggggcaggacgcctggtcaggagtgagcaccattgccccccaggggagcacgaaggggtggtggtggccatattccggatggtcttcaccctcccaagaagagatggatagagggtgggaatgaccacagttgattgtatttataacaaaattaaagaagctcttcgagccagtagctagtccatatctagaagtctacattcggaatcacgaggcaggggtgttttattgcattttcccataatattcacattaccaagaattgatcatccagaaacttatccaaacgggcttttagatgaaatgtcatgaagtatctccagcacacgttcaaaacgtgttctaggcagaaggaaaccctcctgagctagccagactgggatgggccctggcttcctctccaccagtttagctcgatactacccagcgcttagcctcctggtcttttctgtttttctcctgtgtagaggggaatgatcatggtccttggcagatgaaaatagtttaggaccgaagagtggttcagataagaatccttgctgtacaagcaggaggagctgagctcaaatccttagcccaccctcaccgcccacccccccaaaacacaaagcatggcacatgcctgtaacgcaggccctgtggagggcggaggcagagggattactggggcgtggtggctgctagcctaactccagaggcagtgagagactctgtctcagggaaaaggcaagaaatgatgtagcagggtctgtgacat

SEQ ID NO: 8 - DNA, 3607 bp, Mus musculus
gaaagaaaaagtcgaaatttaaaacttttaagaagctgtttgggaagaagaagagaaaggaatccccctcacccacaggaaacagcgcctggaagcaaaatccggccaagagcgaggtcattgccgttgaggagtcggggcccgtgtatgactctgaagatgagctggaggagtccaggggtactatgggcagccgggccctctcccacgacagtattttctttcctgaatcgggacaggaccctgctcggcccgtgcgggtgttctcccaagaaaatgtgtgcgaccggatcaaggctttgcagagggcgcagtctgagtgcctgagtgacctgtcgtggaccctagatgaggaagactatgaggagaagccattgcttcatgtcagcatggaagaaaccccggacgctaggcagcgggatttgataccaggcagaaggcctgagtttgggggacctgcaacctttctgtcacctgggggggcctgtgccaggcgtgctcgcctacagcacagcatggcagtcagtgccagcatggaggagggaggctgtcctagagatgaaccctcaagccttccagctacgccagaagttactgagcccatggtggtctcagtcccaagcttggagtccccatctctgccagaaagttctccaaaccatattctccatagtaagagccagaaggaagagctgtcccctggaggcctgtgtcccctagtggagagtacatcagaggaggctccttgtggttctggagttgcagaaacccctctatctactgatgtccctgagagggacatgggaccttccaaggagggctctgcacctcctgagggagacccagcattttctgaaagacacatggcattccctggagggggtagcatacctcctgaaggaaacacaacacctcacaagggtgtcatggaacctcccgagagagacatgtcaccttccaaggacaacatggcacctcccaagaggatcatagcacctccagagagagacatgttaccttctgagggagatgtggcacctcccaagaggatcatggcacccccagagagagacatgtcacctcccgagggagatgtggcacctcccaagaagatcatggcacccccagagagagacatgtcacctcccgagggagatgtggcacctcccaagaagatcatggcacccccagagagagacatgtcaccttccgagggagatgtggcacctcccaagaagatcatggcacccccagagagagacatgtcacctcccgaaggagatgtggcacctcccaagaagatcatggcacccccagaaagagacttgtcaccttctgagggagatgtggcacctcccaagaggatcatggcacccccagagagggacatgtcacctttcaagggtgacatggcaccacccaaaggaatcatggagcctcctaatagggacacatcacttccaaagggagacacaccacctcctgagactatcactgataccaacttggagacaccttcagatacagagagacaggaccaaagtgtccagaaggaagaggagctgaccctggtggtggtacccaggcctgagggagtggggacagagtcttccacagcccctgccccaagccctccagtacccaagagctgcctgaagcacaaggccttggtcaccagtgggtcccctgcagagtctcctctgaaagagcctggcccagcagtccaagacaaagcagttgtgcctcccgcccgccccaggcctacacaggctgcaacctcaggaggtccagagagaacagccctggggagaaagaacgagcggagtgcagagccacagcgcagcagcgttaagaggttttctgtgacctccagcagggcacgtgcccgtgtcagcggctctcgccttccggagtattctgcacatgtgcctgcagggggccgagcacccttgctgcggagtggccttgcctggaagagtgaggcagcacttgacgaccttcaggtgctgccaaagccacaggaccggaagacaatgggtggtgaccctcaaaactcaggggatgtgggggccggccaggcaggaccgggcaagagcccccaggaagctgagccatgtgcctcctctgtgcaggagccagccaatggggaggaccagagccccttcccagtcaagctgcggtccacctcactctcacttaaatacagagacagctctgcccaagaggccaaagccatcaagaggtacagcgccgaagtcaggttggagaaaggaggcctggctctgcttcccaaagatgaacagagccacgtcggggcagctcctgcactgcgaggctccaggtcccccaacgggcaagggaaaggaaagaccaggtctcctgagcagccgggtaccaagccacccctgcccaggaagccacttctgccgagccttaccttgccatacccacccacaggcctggataccagccctggggagtctgagagactcataccggtcatcctgcctcccgagcccaggaaggagaaattgtccaatcagggagctgaaaagggtcagcctcctgcggctacaggtcctggggctgatgggcaacccaccccaccctggatcaccatggcccggcagaagagaagaggagccccagacctgcccgtcaaccaggaagagaaacctgggtcgaggatcctaaagacagaaactgggaagcaagccaaggtggccgagagagcccaggagtctgtgaagcagggtgacttcgtccggagcaaatctttcctgatgacccctgcaaagcctgctgtgacccagaggcaggggtcaaaactgaacctcaaggaagggctacagagaggaatctcactgtcccatcagaacttggcagctcaggctgcagcgaccacagagaaggaacttcatcagctgaagagggccagttacgccagtacagatcagccatcctggatggaactcgccagaaagaaatctcaagcctggagcgacatgccccaaatcataaaatagattggcaggctgctggggaaggaggtccactggaccgacgagccacttagttttaaactgccaataaatcttggcaagcagactgtgaaacttacgattgatttttgtcaacggcttctgatgtgctccgagaagagagaggaaccagggggaacggagaagaccagcagacagcctcagtgccgggccagaggggctgtggcaagaatgttgcgaagtttaggggcgccattcctgtgctgagatgtcagcgtgagcctacgagtcccaggtctgcgctgcctcttgccatcagccagtgcctctggccaccgtcttgccgtgggccatcgtggtctttcttgtttactaataggcatgattgtttgtggtaaagcagggattccctttacaagagcagctacccacttaacaatccagtttcctgaagaaacccacccaccccgagaaggagaggaagggacgtggcagggtttgtcaattcatagactgtttccaaaaagaatttttaaacttttccactaggcatctgtgtcctgtgcaaaatgcattgcctgtttaataaaaagtttcaaacatgt

SEQ ID NO: 9 - protein, 1003 aa, Mus musculus
KKKSKFKTFKKLFGKKKRKESPSPTGNSAWKQNPAKSEVIAVEESGPVYDSEDELEESRGTMGSRALSHDSIFFPESGQDPARPVRVFSQENVCDRIKALQRAQSECLSDLSWTLDEEDYEEKPLLHVSMEETPDARQRDLIPGRRPEFGGPATFLSPGGACARRARLQHSMAVSASMEEGGCPRDEPSSLPATPEVTEPMVVSVPSLESPSLPESSPNHILHSKSQKEELSPGGLCPLVESTSEEAPCGSGVAETPLSTDVPERDMGPSKEGSAPPEGDPAFSHMAFPGGGSIPPEGNTTPHKGVMEPPERDMSPSKDNMAPPKRIIAPPERDMLPSEGDVAPPKRIMAPPERDMSPPEGDVAPPKKIMAPPERDMSPPEGDVAPPKKIMAPPERDMSPSEGDVAPPKKIMAPPERDMSPPEGDVAPPKKIMAPPERDLSPSEGDVAPPKRIMAPPERDMSPFKGDMAPPKGIMEPPNRDTSLPKGDTPPPETITDTNLETPSDTERQDQSVQKEEELTLVVVPRPEGVGTESSTAPAPSPPVPKSCLKHKALVTSGSPAESPLKEPGPAVQDKAVVPPARPRPTQAATSGGPERTALGRKNERSAEPQRSSVKRFSVTSSRARARVSGSRLPEYSAHVPAGGRAPLLRSGLAWKSEAALDDLQVLPKPQDRKTMGGDPQNSGDVGAGQAGPGKSPQEAEPCASSVQEPANGEDQSPFPVKLRSTSLSLKYRDSSAQEAKAIKRYSAEVRLEKGGLALLPKDEQSHVGAAPALRGSRSPNGQGKGKTRSPEQPGTKPPLPRKPLLPSLTLPYPPTGLDTSPGESLIPVILPPEPRKEKLSNQGAEKGQPPAATGPGADGQPTPPWITMARQKRRGAPDLPVNQEEKPGSRILKTETGKQAKVAERAQESVKQGDFVRSKSFLMTPAKPAVTQRQGSKLNLKEGLQRGISLSHQNLAAQAAATTEKELHQLKRASYASTDQPSWMELARKKSQAWSDMPQIIK

SEQ ID NO: 10 - DNA, 3302 bp, Mus musculus
agggcgcagtctgagtgcctgagtgacctgtcgtggaccctagatgaggaagactatgaggagaagccattgcttcatgtcagcatggaagaaaccccggacgctaggcagcgggatttgataccaggcagaaggcctgagtttgggggacctgcaacctttctgtcacctgggggggcctgtgccaggcgtgctcgcctacagcacagcatggcagtcagtgccagcatggaggagggaggctgtcctagagatgaaccctcaagccttccagctacgccagaagttactgagcccatggtggtctcagtcccaagcttggagtccccatctctgccagaaagttctccaaaccatattctccatagtaagagccagaaggaagagctgtcccctggaggcctgtgtcccctagtggagagtacatcagaggaggctccttgtggttctggagttgcagaaacccctctatctactgatgtccctgagagggacatgggaccttccaaggagggctctgcacctcctgagggagacccagcattttctgaaagacacatggcattccctggagggggtagcatacctcctgaaggaaacacaacacctcacaagggtgtcatggaacctcccgagagagacatgtcaccttccaaggacaacatggcacctcccaagaggatcatagcacctccagagagagacatgttaccttctgagggagatgtggcacctcccaagaggatcatggcacccccagagagagacatgtcacctcccgagggagatgtggcacctcccaagaagatcatggcacccccagagagagacatgtcacctcccgagggagatgtggcacctcccaagaagatcatggcacccccagagagagacatgtcaccttccgagggagatgtggcacctcccaagaagatcatggcacccccagagagagacatgtcacctcccgaaggagatgtggcacctcccaagaagatcatggcacccccagaaagagacttgtcaccttctgagggagatgtggcacctcccaagaggatcatggcacccccagagagggacatgtcacctttcaagggtgacatggcaccacccaaaggaatcatggagcctcctaatagggacacatcacttccaaagggagacacaccacctcctgagactatcactgataccaacttggagacaccttcagatacagagagacaggaccaaagtgtccagaaggaagaggagctgaccctggtggtggtacccaggcctgagggagtggggacagagtcttccacagcccctgccccaagccctccagtacccaagagctgcctgaagcacaaggccttggtcaccagtgggtcccctgcagagtctcctctgaaagagcctggcccagcagtccaagacaaagcagttgtgcctcccgcccgccccaggcctacacaggctgcaacctcaggaggtccagagagaacagccctggggagaaagaacgagcggagtgcagagccacagcgcagcagcgttaagaggttttctgtgacctccagcagggcacgtgcccgtgtcagcggctctcgccttccggagtattctgcacatgtgcctgcagggggccgagcacccttgctgcggagtggccttgcctggaagagtgaggcagcacttgacgaccttcaggtgctgccaaagccacaggaccggaagacaatgggtggtgaccctcaaaactcaggggatgtgggggccggccaggcaggaccgggcaagagcccccaggaagctgagccatgtgcctcctctgtgcaggagccagccaatggggaggaccagagccccttcccagtcaagctgcggtccacctcactctcacttaaatacagagacagctctgcccaagaggccaaagccatcaagaggtacagcgccgaagtcaggttggagaaaggaggcctggctctgcttcccaaagatgaacagagccacgtcggggcagctcctgcactgcgaggctccaggtcccccaacgggcaagggaaaggaaagaccaggtctcctgagcagccgggtaccaagccacccctgcccaggaagccacttctgccgagccttaccttgccatacccacccacaggcctggataccagccctggggagtctgagagactcataccggtcatcctgcctcccgagcccaggaaggagaaattgtccaatcagggagctgaaaagggtcagcctcctgcggctacaggtcctggggctgatgggcaacccaccccaccctggatcaccatggcccggcagaagagaagaggagccccagacctgcccgtcaaccaggaagagaaacctgggtcgaggatcctaaagacagaaactgggaagcaagccaaggtggccgagagagcccaggagtctgtgaagcagggtgacttcgtccggagcaaatctttcctgatgacccctgcaaagcctgctgtgacccagaggcaggggtcaaaactgaacctcaaggaagggctacagagaggaatctcactgtcccatcagaacttggcagctcaggctgcagcgaccacagagaaggaacttcatcagctgaagagggccagttacgccagtacagatcagccatcctggatggaactcgccagaaagaaatctcaagcctggagcgacatgccccaaatcataaaatagattggcaggctgctggggaaggaggtccactggaccgacgagccacttagttttaaactgccaataaatcttggcaagcagactgtgaaacttacgattgatttttgtcaacggcttctgatgtgctccgagaagagagaggaaccagggggaacggagaagaccagcagacagcctcagtgccgggccagaggggctgtggcaagaatgttgcgaagtttaggggcgccattcctgtgctgagatgtcagcgtgagcctacgagtcccaggtctgcgctgcctcttgccatcagccagtgcctctggccaccgtcttgccgtgggccatcgtggtctttcttgtttactaataggcatgattgtttgtggtaaagcagggattccctttacaagagcagctacccacttaacaatccagtttcctgaagaaacccacccaccccgagaaggagaggaagggacgtggcagggtttgtcaattcatagactgtttccaaaaagaatttttaaacttttccactaggcatctgtgtcctgtgcaaaatgcattgcctgtttaataaaaagtttcaaacatgt

SEQ ID NO: 11 - protein, 902 aa, Mus musculus
RAQSECLSDLSWTLDEEDYEEKPLLHVSMEETPDARQRDLIPGRRPEFGGPATFLSPGGACARRARLQHSMAVSASMEEGGCPRDEPSSLPATPEVTEPMVVSVPSLESPSLPESSPNHILHSKSQKEELSPGGLCPLVESTSEEAPCGSGVAETPLSTDVPERDMGPSKEGSAPPEGDPAFSHMAFPGGGSIPPEGNTTPHKGVMEPPERDMSPSKDNMAPPKRIIAPPERDMLPSEGDVAPPKRIMAPPERDMSPPEGDVAPPKKIMAPPERDMSPPEGDVAPPKKIMAPPERDMSPSEGDVAPPKKIMAPPERDMSPPEGDVAPPKKIMAPPERDLSPSEGDVAPPKRIMAPPERDMSPFKGDMAPPKGIMEPPNRDTSLPKGDTPPPETITDTNLETPSDTERQDQSVQKEEELTLVVVPRPEGVGTESSTAPAPSPPVPKSCLKHKALVTSGSPAESPLKEPGPAVQDKAVVPPARPRPTQAATSGGPERTALGRKNERSAEPQRSSVKRFSVTSSRARARVSGSRLPEYSAHVPAGGRAPLLRSGLAWKSEAALDDLQVLPKPQDRKTMGGDPQNSGDVGAGQAGPGKSPQEAEPCASSVQEPANGEDQSPFPVKLRSTSLSLKYRDSSAQEAKAIKRYSAEVRLEKGGLALLPKDEQSHVGAAPALRGSRSPNGQGKGKTRSPEQPGTKPPLPRKPLLPSLTLPYPPTGLDTSPGESLIPVILPPEPRKEKLSNQGAEKGQPPAATGPGADGQPTPPWITMARQKRRGAPDLPVNQEEKPGSRILKTETGKQAKVAERAQESVKQGDFVRSKSFLMTPAKPAVTQRQGSKLNLKEGLQRGISLSHQNLAAQAAATTEKELHQLKRASYASTDQPSWMELARKKSQAWSDMPQIIK

SEQ ID NO: 12 - DNA, 185140 bp, Homo sapiens
gctgacagggcctctgaataagaaagtagtgtcagaaagagtaagcgttaagcaggaaagtgcagtttcatggaaagtaacattgttaatgttagaaaccaacaaaactatgacttttagatagcgtagcaaaaaggacacaccttttttttaagagggaagaattaataataaatcctctaaaatttgaacaagttaaaactgaaaatgtttttgagttaccagaagatattgtgatggacactgcccacaggcatttaaatggctgcccaggactccaaaatctcagactgtcagtgtttagcatgtgtcaaaaaaaaaaaaagtggtgcctagaagagccttagcttagagtcagcctaactcccattagaacagtgtgaatgacaacccccatttaaaatattattatatttggccaggtttcagccaaggtgtgtctgccactagacacctctgctatagactgtgccagtgagttggaattggaaaatggggttaccagcaatacaactagggaaattgaaaatagattcagcattagtttcttactgctttgataacgaattaccacaaatgtagtggcttatgacaacacaaattaattacctcacagttgtagaggccagaagcctgataggggtctcactggggtaaaataaaggtgtctgcagggtcacattttccttctagaggtgcaagggaagaatccattctcttgccttgttgagcttttagaagctgtccgcattcctcggcctgtggctcctgcaccctcagagccggcagtgctgagctgagccctttgcacacaatcgtctctctggtcctcatctgcctccctcttccactctgaaacaccctaatgattaccttgggcccacttagatgatccaggaaactctccccattttgaggtcagcttattagtgaacttgtacctggtaacttgaatgtttcctgtagaaggaatcacaaccatccagaggaggacacggtggggaccaggaacacacaatgactgagggcagttagggctagttttgctgtggggaatggcaaagtgagctgtgcagggacacaggaaagaatgtggtgtcattcgggccttagaagcctcccacctgggactcagtcagatgcttcagcccattcatagcatctactcaggaattcctctctgtctcctaaggaaataaatataggcaaaataaatgcagacaaactacatacacagatatttgtcaaataattttgtataataccctcaaactaaaaagaaggcaatagagaaatgataaaacataaattatgatgtacccacataatggagtattagccagttattaaaaatttatatttataaaaactttatcacatgggaaaatacttgtgttacaatgtgcttgaaaaaatcaggatacaaaattatgtatttgtcttaatctcaactatgtagaaaacatttgagtttgcaggtcacctcaaatgccttttctataaaagaaaaactggaaggaaaaacaataaaatggcaatagtgattcttctgtggttggaattattgatctttccttttttccttattttatgtactatcccatttgtttttttagagaatgattagatgttgtaaggcccaagtgaggctggagactgtacatttttgtggttttggtctgcatggctctgtgaatttccttggcagcacagaagggcctgtgtaggaacaaaggaggctgatgccggagaggcaggccacagactgggagaaggtatttgcgcattctctctgtgtccctccctccctctctctatgtatgtatgtatctacacatgcacacacatatgtacacacagacttaaatacataaatatatacaaatatagatacatttccaataaaggaatgaaatctggaatatataaagggtcctatctggctgggtgtggtggctcacacctgtaatcctatcacctatcactttgggaagctgaggtgggtggataacctgaggtcaggagttcgagaccagcctggccaaatggcgaaaccccgtctctactaaaaatacgaaaaattagccgggcgtggtgtgggcacctataatcccagctatttgggaggctgaggcaggagaatcacttgaacctggggggtggaggttatagtgagccaagatcatgccacttcactccagcctgggcaaagagcaaaactccatcaaaaaaaaaaatcctatctatctatctatctatctatctatctatctatctatctatctttctttctttctttctgtcatctatctctatcatctatctatctaaagaaaaaatagcccaataaaaagcaaaagacaaataggtacttcacaaaagaggatatcaaagtagccaatggaaagatactctttattagttatcagagaaatgaagattaaaaccacaataagacatcactacagcacctactgaaatgactaaaattaaaaagaatgacaatatcacatatgcaaggatgtggagcatatgaaacttctacataaatggtagtaatgtaaactagttcaatcaccccagaaaaatgtttggcaatacttaccaaagctaagcatatatatgccctgacttagaattccacacctggataatattccggaaaattgagtgcttgtgcctaccaaaaacatctttaagaatgttcatagcagatttatcataatagcacaaacctggaatcaactcaaatgcccaagatggtgcccaaggtaaattggtatatccatacaagggaatactacacagtgataaaaaggaatgagccaaaattcaaaacatggttgaatctcacagacataatattgaataacagaagtcagataccaaagaagacacactgtgtcagtctacttatgcctgtctatgaggtttaacaacaggcaaaattagtctatgataatagaggttggaatagtggttaacctggggttgccacgaattgaagaagcacacaagaaggcttcctgggtgctggaaatgatctagatcatgatgtggatgatggtggtaggggaataatcatatgtaaaagttcaagctacacacttaagatgtgtgtcctttaggtcagacagactcagaaaacagaaaccaaaccaatccttccctgcacacaaacaagatttacccaactgtaaaacaatgcaattttatgaaatttatcagccatgataaatttctaatagaaatataacctcccagcctcggccaacactaagccagagctatttaatgttcactaaacctcagataccttcctacagatcagtaaactggccggatcagatgtatagtatttaaattaggagaaacattccaaaagggaaaatatagaaggccttgaacttgttctgacctaaatctgcttgattttgatttatttatttatttatttatttatttatttttgagacacagtctcactctgtcacccaggctggagtgcagtggcatgatcttggctcattgcaatctccgtctcctgggttcaaggaattctcctgcctcagcctccctagtagctgggactacaggcttgcaccaccacgcctggctaatttttgtatctttagtagagatggggttttgccatgttggccaggctgttcttgaattcctgacctcaggtgatccgcccaccttggcctcccaaagagccaagattacaggcatgagccaccatgcccggccccacttgtttttttagtctgccatctattttacaaagaattctgtaacgggccgggcacagtggcttacgcctgtaatcccagcaatttgggaggccgaggcgggtggatcacctgaggtcaggagtttgagaccagcctggccaacatggtgaaaccccatctgtattaaaaatacaaaaattagctgggtgtggtggcgcacccctgtaatctcagctactcagaaggttgaggcaggagaatcgcttgaaccagggaggtggaggttgcagtgagctaagatcatgccactgcactccagcctgggcaacagagtgagactctgtatttaaaaaaaaaaaaaaaaaaaaaaaaaaaagctgtaacaatttgtgagaaaacattcagaaccactgaaataaaggcgtgataataaatgcagaaactcatggctgttggaattgtcctgaagacagttaattgctggttagagacaaaatgcacactgctgcttgattgtgtacacaaaaaatgtacccacctggatgttgtggtgacagatgatacacataaatgacaggcaagaaagtaggaaaactaaaagagagcaaacaggccctcaatgcctgtctaaatgttaagagaatttcatagaattagaacaaagcaccagcactaaatgatgtgcataagaatctgtaatcctcagaccatatttgcaaacttgtgtgaaaaatgggactatgatgtacccccgttcccagacaaatctggaacagtgaagcctaaaacacaggaaatgcctagaaatgccacgcagaagtcaagagctttggagtcatgtatggagttggacatttagtctcactgtgacctttgggcacattccacaaaagttctgaccttcataaaattccctcacagaagttcaaatgggaatctgtgaaagcaaataatgtaatatcttattattattttttttttttgagaagaagtttcactcttattgcccaggctggagtgcaatggcgctatctcggctcactgcaacctctgcctcccaggtgcaagtgattctcctgcctcagcctcgtgagtagctgggattacaggtgcccaccaccacacttggctaatttttgtatgtttagtagagacggggtttcaccatgttgaccaggctggtcttgaactcctgacctcaggtgatccacctgcctcggcctcccaaagtgctgggattacaggcatgagacactgcgcctggccctatgtcttatatattataggcactaaatgaacaatgggtgtcatgatcatatttgcagattggaaagatccatctttgtgggtggtgctcttggaggaagtgggtgcaagctaatcttccctaagatctaagcggcagggagatactgtctcatgtctaggatcaaagatcagtgttactggtctgggggtggatatggggcattgagagttcatacccatcattaacgttctccgaagaagaacgcaaaaccatctgttcagaggagaacatggtgcagaccgggaacacacagtatgtgagagcagttagggctacttttgctgtgggcaatggcaaagtgagctgtgcaggaacaaaggaaataatgtggcgtttttcaggccttagaaccttagacgccttcccacgctgagactcagagccttcagctcattcatagccatcagctcagggattcctctctgaatatctcctaaggaaataaattaaatataggcaaaataaatgcagacaaattatgcatacagatactttttttttttttttttttgatacggagtctcgctctgccacccaggctggagtgcagtggcacgatcttggctcactgcaacctccacctcctgggttcaagcgattctcctgcctcagcctcccaagtagctgggactacaggcacgtgccaccatgcccggctaatttttgtatttttagtagagacggggtttcactatgttggccaggctagtctcaagctcccgacctcaggtgatccgcctgcctcagcctcccaaagtgctgggattacaggcgtgagccactgagtctgccgcatacagatcttgttaaagaattttgtagaacactcccaagttgaaaacaagacaatacagaaatggtttaaaataataaatcatgatgtatcacataatgaaatattagttattaaaaacttatatttataaaaactacattatcacaagggaagatacttgtgtataatgtagctgaaaaaaacaggatacaatcttgtgtatttgccttaatctcaactatgtacaagccatttgagtttgcaggccagcttgaatcccttttttggaaaaagaaaaactggaagaaaaacaataaaatgccaacagtgattgcctctgcggttggaattattggtgatctttccttctttcttattttatgtaccatcctgtttgtttttcagagaatgtttaacccatttatgctggaggttgcaattttcttatgtgaaaaatcagaccttggccatgaccttcagcagtaggatgtaaataactcccacaagcttagcattccaataatggaacactaggcattaatgggctcaaagtagtaaggcccaagtgtgggtggagactgtatttttgtggtttaggtctgcatggttctgtgaatttccttggcagcacaaaagggcttgtgtaggaagagaggaggctggtgtatggttggggtttcaaccaggaaggtgttggcgggggtggggggggaccaagggatgagggcactgggggtgctggtaagagagcagtcaagggatgaccatgaggcccagggctaggcagggtggaggctggagagagatgactagtgagaaatgagcagttggagcagaaggtccttggatgggggaggagcagaagtttaggaaacaacgggatcaagactagggtggaaaaaaattgggaagagagagtgggtgcagtctcatgcatttgagatacagcagtttcagggtcataataggccatggtgaaagttcattgattaataaatattgatccagcagctattgtaaaccagcaccgtgctaggtgctagacacagatacagaccctgccctcctggaggttgtgctctggtgagggactccagtatggaataaaaaataaatcactccaaagtgtaatatgttctctaaagaagaggagtaggagggaaatacaggtcaggaaaaaaagaccaaaggaagtatcactgaagctaagtcctgaaaaattagtgggagtcagccaggtgaagggtgggggcagctggggctaagccctcagggcaggaagaagcttgggttgttcacagaactggaagaaagccagtgtggctggagtggagggagcagagggtggtactgaaaggaagcccaggagatgtggtcctcttaaggagtctgggtttcaccctaactgcagggaagccagggaagggttttgaaacagggaaaggacagggtccaatccctattgctggagaaggatcagagggatggtggctaagatctgggtattgctggacagccgcctgcagagagcccctcaggagtagggtccctgtggcctctggcagtgaggcagctcaattcgacctctgccaccatggctcacctgggcaatgggcctgttgagatattgtttcttcctaattggttcctggctggcccttgactccaatcctctccccaggtagggatgtctgtgcctatggggcctgtattttctgaacctaagtgaagacaagcagattgagtgtctgtgaagacccaaaagcagaaccctgggatgaacactgtcctgaaaattgtccccgctaccatcctgggttagaaagcacactgcctttgacttcaccgtcttcaccccattaattaccagcctctggtttgactaagtgaagattcaggactgatgattagcaatgatgatgatggtgttgggaataactgagtgaagaagcaaatgtaaatattttaaagtgtaaatatcaaaagtgtaaatactcttgctttctgagatcccaaaagatgccttcctcttagtgtgggaagggttgatattcctttcttttctaaactaaaaaatattttcagtttgcagaggtagacatcattttcagaaaggcagctttgcccagccttaagtgcagattaggggttcaaaccctggctctgccacttactatctgcatgcccttgggcatggtacttgcccttctcatgctgagtctcctcgtctaccacatggagataatagcagcatctcggttgcaaaatcagggtaatggcaggtcttagctcagagggtctgctggcaggtggataatttaaatgagtgactatttgtaaatggcttagatccgtgcccggttatttgataaaagcatgttcccagtgaggtgcaatatatttagaagtagcatggtcttctttcttttggcttgtcaatgaggttctccttctctgaaagggatgtgttcaggggtagctgagagattttctggagcctcaaaaaacaaccaaccccatgctcttggctttctggttgtccatgcagactgcaagaaacactatgtggggtctatgtttcttttgcacttttgacaaatccttacttgaacattttagtcttttcttaacctggcttcaaggcttgatccaaaaggcattaaggaggggaagagcctccttgactgccagccacttggcagggccctgggaaccagagctctcacaggaagatgaaagtcccaggggtaggggaggggcacagtttctttccacatttttaaagcatgaaggtgcttgctctaccaggctccagataattttccattttcccaacctattcacaaaattccccaccagtttctattttgagtgttgacaccatgttctcggccttaactaatcaccaggaacctcggtttttgtcttctgaaaacctccaggaacttcaaaagccacccacagaatacaaataaagccagaggtttaagatattctggaaacgaaattcttaggtagaaaggcagtttatggagtccataaatatttagtagttacagcggcaaaaactaacatgattttgaagagcaaggagcagaggctcaaggtgggagaggagagaggggagtatagtttttgcagttgttcagtttagtttgaggattttgaaaaaaacaaacacacagacacccaacaaactcgttgtctctgattgtcatgagtcacccattcattgtgaatgcaggttattaatttgggggggggttataaggctgaatcactatttttgttctttttatacagggaacttaaagcacttaaccatcaaaagaggcttttacgtgaatagcttgtggccaagggataacattaaaaattcaaaaaggaaacttcgtttgatatgcccaagtaaatgggaaactgtcttgggcctcgtttcgctcgattcttctatctgggattttgagccccttgaaagccacaggtggagagagctccttccggggtccaggccctctcggcctccgacagccgagcagctcggcttttccaggcctccagtgtgcgcggcgctagccgtcggacccagcgtcccgcggagtagcgcggattccgcgtgatcccctccaaacaatgcggacctcgccgctcattctggcgtccggtgacacccgagactccccgtctgacgttagtatcatctcttccagcctgggttgaaggcgtcccctgaggactcgtcgcagcctgggctccctgctgggacgcgactcccgcgcctctcgcctgcctggccctgggcgtgcaccgccggggaagaggccgggacggggtcgccgggctgtgccatccgcagaccaaagccgcggctcgggctccggaggagattcgctgggcgaccacccaaggcagctccctccgtgcgcggtctccctaaatggaccagccctgtctttacaagaaaaaggattttaaaaaaagaagaaagaaagaaaataaagaaaggcgagcgcagctgagacggcatcagctgcctttcttcccacactcgccggtgtcacacccatgaatcacctccagacggggcggcagcttccctaattagcctggagacgctcaggacccacagggttataaaacaacaacaataacaaacttttacttttattcaaatgcacacttccttccctcggcgcccacgcccgccgcaggccactgacttagagggcggatccggaggtcacctggagtcccgggtccctctcaccgacgcgcgcgggtgccctgggccagtcccggactgacttgccaccacctccgggtctccggtgccccccggccctcccggagccccgacagcgccgctgcgcggacaggccgaggcgggtcgggagcggcgcgggcttgggagggagcgctgggcagccgggcccgcaccccgattgccctccccgcaccccgatcgccctcccgcctcccgcggggcgtccaaggcccaggccggcgcctgcgccccccgccccgaggtctcggccccactccgccgggccagctgcggaggcggcgttgggagctgtgcgccgcgggggaggtgcgcgcggcggccggcgaggggagctgagcggcgtccgcccccgccgagccgagcggagccgagcgaagccggcgcgcctgcagctgggagctgggagctgggagcgcgccgggcgcagggccgggccggccgcgggagggtagtgtcagcgcccgcgtccagctcttcggccgcagacccgggctgtctggaggccgcgcggccacctgctgcgtcgccccggctttgggctggggctagacgcgcaccgcggcgggagcagccccggctcgccgcaccccgcggaaggtgcccttctctgcgcgtctcgccgagcccgggccacgctcctgtcccaggtacctcgaggggtttgaaatcgcgtgtcccaaggcaggcgtgggtcgaaggcggggtgggcgcgggggcaccgggcggaggtggggcgggccggggctagggggtcgagggcagaggccgtgaagccaggggcccctcggacccggagaggcgccacccccgccgccgaagccctgggcagctcctgcggccgagggggagccggacgcgctcgtgcaagtgcccaaagtttccctttgctcactttgctggacccaactttccactgtgaggcaaatccagcagtttacgcgccaggaaaatgaaagaggagggagagaaggtcctgctcggttgaaattgctagcatacgaggtctttatgcccactgtctccacacgcagttgcaggggaaaggagtggacacattcacgaactgccttatgctttaggtgatggtttatttaacaggttttaggctttgattacacgccacccgggagggattctggagttgatctaagaagtgttcacatttttaatcaacaaatatttgttgaacagaagcttcatcataggcaaagattcggtatgaagttcacatgtgatcagagcataatagtcacttgcttttgaaatgcaagtcagaagcagtgcggctgtgtgaatttgactccgtgtaggtgcaaaccgcctgcaggcatcaggtcctgttgacagttttgagccaggaaatccaagtggaagacaggcagctgtgttacccttttagagccagctcacaccttcccaaactggtcttaaggtatcctactaggttattggagcctgcaggcttccttcatttgcatataccatagactagaatctgtgtagacccctggtattttccctggagctcggtcccacgggcgcacacctggaatgatggagcactgtggtcatcctaagaacctattgaggttataaaattgtgaggagaaagatatctagagacagtgtcgtgtggagctggtggagaaggttgagctgggctggtttctgggctctgcccctatgctgtgccatcttggagtctgaggcaacaggaaaaatcaggaacactgatcctgtctttatttaaaaatgtgagattttgtacattagggatttttgtatttgttttgatgttttaaaatattgtaataaggcatttatctgactgcatttttggtacccccttaaattttgtgcctgtagtgagtacctggcttgcctgagtctgattctggacctcctccacgagtcaagttcttactctctaagcatctgtttcctcacttataaaataaagtgtaccatccatggatgctgcgcagctcagctgctgcataggatgcgtcatgtggggctcactaacgggtggctgtcctgctgagatcactgctctgcttggccctcttaggctagttaagatgaatcttggctgggcgcgatggctcacacttgtaatcccagcactttgggaggccgaggcaggtggattgcctgaggtcaggagttcgtgaccagtctggccaacgtggtgaagccctgactctactaaaaatacaaaacaaaaatagccaggtgtggcgcctgtaatccagctactcgggaggccgaggcaggggaattgcttgaaccagggacgtagaggttgcagtgagctgagatggcaccactgcactccagcctgggcagcagagtgaggctcagtctcaaaaaaaaaaaaaaaaaaaaaggatgaatcttgaccaatctcagtgcaccattcagggaaatgagagcagtgatagtgctatggtttgaatgtttgtgtccccccaaaaattcatatgtggattcctaatcctcaaggtgatggtattaagagatgaggcctttgggaagtgataggtcatgaatgggcttggtgcccttataaaagaagcgcaaggagctcgctcgtcccttccaccatgtgaggacactgtgaggaggcgccttctatgaggaatgggcccccaccagacacccaacctgccagtgccttgatcttggacttccagcctctggaactgcaaggaataaatgtctgttgtctatgagctgcccggtttatggtattttgttatagcagctgaaatggactcagctggccagccctcagggatgctcttggttaaatgagagaatagatgtgaaggtaccaggcctccaggagggtgggttttctgtgatgtcctggtgggcctggatttgacttagctaccttgcagtcactggctcttcccctgcaggctggctccgtgccttgtcatgcagttgcttgttgtgcacataaatactgcttgtgttgcaggtggactctctgggtggaaacctgcccagggtttattgtggaaaggtgcaaaattttgtgtaagtgagcttgattttgctgtccctagtgaagtcccttggttccctttttcatatactcagttcccagtgcatggttctgtttttctagagcctaattcaatggtattatttcagtcactatttagcttaaaggtagcttcgtccctggtgggagtcagtctctcagtctttccacgttactcctcggggaccccttttcgctacaagtcacccctgggcaccaggagagggttgtagtcccatcagagcttgaggggagtggccctgactggtcatctggtcctcttgcggtgccccagtgagtccctttcccctccacatggagcctccggctcacatttccatcattgtccagctggtgtccccagggtgagccacagcggggacctggctcttccattggcccagaggtccccatgctctgaggtctcttctgggcccctattgggcacctgggagcccgcccaggttgtgcggaaccgtactaggcctccatttctactgttctgagctcggccttccctgagttcccacaggaagcaggacaagaacgccccctcagccccacccctgctcctccaggtggggtgcacagcggtaggtgctcagtgcctgggttcatgtcccagacccagaaggcatttttctacctgtggggcagggctgtttcttaggttctgtcttctgtcctctgcacatcatggctttggggagagctctaggctccagcttccaggctttgcccttgatacataaaaggaagtttaaaatatctctgtattcaccactgtcttgggtaaagtgtgctaggcctttttattacctgaaaaagactgggagagccgtcggggctgctggagacttcagtcagggctgggagaaggcaaggaaggagtagctggcagcggcgttgcggggattgaatggctttctgcgtacacagcccggcccactgtcatggggatgggcgtcttccaaaccaccgttcctatttatgctgttgctgcctcatcatcagagcaaccccctgtgtgcttggcactcactacaagccggaaaggtccgagtcataattgctgcttctggtgaataagatgagcccttgtcaagcctgtacctgcaagcctgagccctggatttagttcacactcagttcacactggatttggaaggggaggtaatcaggggaagcttcttggaggaggtggaacttaaagtaacaacttggccacatggatgtgagatgcaagagaactgcctttgaaagggagacaggccggcccggcctggtgttcacaggcccacctgtggcttgatgctggctggtgtcccgccgatctcttctgttgtctagatacctgcaaacaccggtactgctggtgtcacctgtgggtaggacaacacagacagccagcgttcaaaatccttctgttttccccaaactgaacggaaatcaggagaattctcatcaaataatgctctttctagatctctgtgtctggaaaataacttcaaaactttaggtcagattaagagtccttaagacacatttatgattttgacaaattaccttgaagatatttgtattgcttttaagggggtctaacccataatcctgagccaagtggataatgaactagagatgctgtttctgtcggtgcccagtgaatttagcagtgaaatgatgggaaatgataagacaggcatgtgatgtaacagggcacctcctgagcagcgtcagccaccagcttttcacaggctcagataccattctggaggagactgctggtaggaaggattctcagacatttttcttatgatctgggtatctgtgaaaggaaattatggaagttcgttttgaaaagtgcagatggaaaggtatttatttgctcaggccttctcctggctgtggtgtgtggggctggtttttaactgtgtgtagctgaagaacttccagaaatatttgccttaacctctgaggtccatacaccagtctctccatggtttctgccctcaaattctcatgtctgtgggaagcaccagaaccattagctgcggggtgtgcagtttccaagaaactactctcggaaacactgccccatatgtgggaggagaaaatgtcagagaggttgccttctttttaaagcagttggtccagtcaaggtcaggggagtcaggctctagtgtctttttttttttttttttttttgagatggagtcttgctctgtcgcccaggctggagtgcagtggcgcgatctctgctcactgcaacctctgcctcctgggttcaagggattctcttgcctcagcctcctgagtagctgggattacaggtgcctgtcaccacacctggcaaatttttgtatttttagtagagacgaggtttctccatgttagccaggctggtctcgatctcctgacctcaagtgatccacccaccatggcctcccgaagtgctgggattacaggcgtaagccaccatgcccagcccaggctctggtttctgctgtgccacttagaagtcctgcaacctcagtcaccccttagatggggtgggggggtggtagacacacacacacacacacacacatacatgagcattacatgaggtgctgtatgacaaacatagaaaatgctccataaattatttataggtattactctcttattgtctttcttgtaagacggttaaagggcatttgttataactaccagttaggacccctactaataatgttccctaaagcaataaagggtccttccataactgagatctgatggcatttaaggaaaatgagcataactgccatacacagtgctcctgagcacagctgctggtggaagctgtcatgtggggaacaaccttgacgcaatttagaacacacagggagaagcgaggggacggaagaggggtaggtgacacaggacaggggtgggacagagatggggtaggtgatataggtaggatagggtggggtcagagatgcagtaggggacacaggacagagggtggggatggggatggagtaggggacacaggacagagggtggggacggggatggggtaggggacacggtacagagggtggggacggggatggggtaggggacacggtacagagggtggggacggggatggggtaggggacacggtacagagggtggggacggggatggggtaggggacacggtacagagggtggggatggggatggggtaggggacacggtacagagggtggggacggagatgtggtagctggaaagcatccgtgtgtcctgtcttgctctgcagcatccgccttccccactaatgtgtgaggagaaggacctgacttgaagcacttgcatgggggccacggatgggaggtgccctgggccaagacatacgccccgtcgtgttggagagacacagggatggttctgccctgccacgtctgggctcactagtgagtgtgttgaacagccttggattcagaggaccagcattgggtcaccagtggggaagcgaattttgagggaatatcaggttcctctgggtaactggtcccgtgcatacaaatgtatcgtggtatcgagcaccttttccatgtcgaatgtatcgtgagtctttgctgcccagctgccttgggtccatgtggtgcttcatgaatactaggtgtcttagagctcgtatctcctcctctgtttgatatacacctgctctacttcctatttatctctacttgacatatcctatgagattcacccattgcgtttgttgtttttttcttcaaaattgaatgttcccaaacaatttgacaaatgccccttattgaagacactaaactcgtccctgagaatgggttttgagattgggcatagttttgtgaagccatcatcccatccagatgggggagcctgccgtgcctggggcattctgggaccaggtgtgggtctgtagaggttcgcgaagctttgcttacactcacttcaggtccacagacactgaactgtgtgctcagggatggtttcttcccctggctcctcaggacagagacatgaccagagaggcggctcccccgtcccactgtagatgctgcttggagtctgaggcatactgggctgctctctgggctcttggtctgattacaactctgcgactacacacaaggtctgcaccagacaggtaagggagtaggtgcggtgggcacaggggccacaccaggtccaagggcatcggcccagaccgtggctctcgggttctctcccttctgtgcaggcggcatgggaaataccgcaagcactctgaagccccatctccactctttgcctgctttctaacctgggtttaacacctccctcctggctccggagtttctatgatcttgctttaataccttaattattgacctttgttccctaaggaggggtattaagaacttttttgtggatcttttctgcatggaagatttgtgactttgaatctgcagcactagcttggccagtggaggtgaggagggagaagaaatggggtgttttcaggggtcagacccactcccttgaaggtctgagtcaaatggccacacctctccatggggctgggtgattcggtctctgagctgtgatcatttctacgggaaccgaattccatgtagttttggatggttgctgggtgtcagctacaagctccattggaaatcacattctgaaattatcatgtgttagtgcttccagtatgctctctggttgaaaatggcatttttatagacaaatacaagcattttgaaggtttgagtcacttgctttgtgaggcttggccagtgttatcttgttttcttcacagcctttgtgagccaaaacaggtctttgagttgaggtgtgctggtgcgaggggcttctctggtaccacattctagaacagaaatgactgaatgaattttgtgggcctgcgtcagcctctcgagtagctggaccctcggtaggggaggaagccctatagaccagacatggccaggccagccagcagggagggcccagcaattagcacgaagaagtctggtcagctgtctggggctctgaacagactagagatttccctcacctcagtcaggctgctctttggccacagtgttacgtggcttgaggctgggtgctgcagtaactgtctgtaccatcaagcctgggggcggaacaggagcggatctcttacaacatttggggcagagccttccgaacttctgtctgtgctatactgactatacatacatacgtatatgcgctaacatacatatttaccccaaagaggtaatgtctgtattgttttgtgagctgtcttatttttttttatttttatttatttatttatttttttgagagtcttgctttgtctcccaggctggaatgcagtggcgccatttctgatcactgcaacctccacctcctgggttcaagagattcttctgtgtcagcctctcgagtagctgggattacaggcacacaccaccatgactggctaattttttttggtatttttagcagagacagggtttcaccgtgttggccaggctggtcttgaactcctgacctcaagtgatccacctgcctcagcctctcaaagtgctgggattacaggcacgagccactgcacctggccatgagctaccttttcaaaatgaatggtacaagttgagcctcttttccacactactagattattagatattcttcgtttgcatccattttcagggctgcaagaaattccattgtagggataggttccagtccacgagccttctctgggatggatgtttaattaagtgattttcaaccatttgccagttagttaacatgacaatagacatccttgtccatttgtcatttaaaattgtgatgttttgtgcatcatgagtttttgtattttttgcgcttttgtctgatcagtgcctttgcgtaccgtctcctaagtagatttcctgtgtatataccagactccttctttgatatgtcctgcctgaaataattttttcacaccaagttttttttttttttttccccaagagatgagtctttaccaagatttcctgaatcttggttggcagcatctgtgttactcagaattcactctcattcgctgaggcagaagaggatttagtgcagggaattcaggacccacagaattgttgcaagcttgggccttggccgcatgctcaggaaccaccgcagagtgacgctgcagagctggcccgccggtaactgctgcctccagcgtggccagggagtcattggtggctccaggccacacacctcccaccgtccacccgcaccagggagggtcccacctgctgctctgcattagtggagccgtggaggaagctctgtgacctccacctccgtccacaggggaaaccagatacgtccatagtggggcctcttgacgtgagccctgaagcctccctccctgctgtctcctggaagtcagattggacacttcccagcctgactttcagagcaggtggagaaatgaggggaagccacacacaaatagttcctgcagatttaccttgcatacaagccaagtacttagaaacgaatccctggagacccgccctagctgagagggtgggtgggttgcgaggggctgtctggtgagtctatctggacattggagaatcttcgctctctctgcccctttcctggccgtgttgagtcaataccgagcaacccttcgctgcaggcgtgggaaggaggcaggaattaacccactgctaagttaatagccaatgttttttcatgagtcataattgattcgcattcggtttatgaacaacatttctctttgcctcttcaaacaggcctttgtgcatacttactgtgaattcaggtgtctgtagagttccaagctgcccctctgagtggatcattgtattttcggtgttcagcgagaacattgctgaggaagggttccaggagacacattgtctttagcaaccccaagtgcagctgtgggcctgtgagggttggagaccatgggggcagctgcttgcttcatggtgcacgctcttgggagccagcagtaaatgtcaccccttcagagatggactgttcaaaatggcctgatgctccccaccctgcaagctcccaagaggatggtgggaggggatagaaagaaggcgcccagccccctctcagttgaggtggagtggacagccttccccattctaatcctgggagggtacagtggcttatgcttctagcccatccaggaattaggcctgtctggggaacccatattttctttaaaaagagaaaatcatactgatttcacatgtaccaaatgagtcaccttaggtttctatggcaccttccctttgtgaattaaaaataggatatgatttatatgtaacagctggttttcttcaattttgaggggtaagtgttgattgtgcattatgaagtaaattgtaataattattttaccagctacagcggtttttctttcaattcttctaatcatataaaatgagatcttaaaaattgtaaaaaaatacagttattttttgtagcatataaatactggataatccaggctgcctaatgcataacctctccctcctgcccaccccatattgtgatttaaaataattaataaagtgtgtgtgtgtgtatgcatgtgtgtgcgcgcgcatgtgtgtgtttagaagagaagtccattccagctcagagatttgatgctgtattccacctgtcgagcattgctccccaccttttgggtaacttcacctttttcatcttatttaatccttgtagtcaccctgtgtattttataagtaagaagacccaggcttagcaaagtgaagtcactttggcaggattgcatagctggtgagtgagagctgtgagcccacctttatcccgcttccctcacgaggcgcactccccgtgtatgcagcgtttgttcctctgggtgaaccctgatgcctttgcccctctgcctgtgcgtgctgtgtggttgtcggtttcagtactgttgtggctattcagctgacacacaggggctgccatgattgcttcacctctcactgtttttatccccactttacagaagagcaaactgaggcacagacaagttatgcagggatttgaacccagggtcctttccttgtcaccttgtttttaacctgtctcaagccgagaacttggaaacagtgtcaggaagtgtcctggtaacccacccagggtttcacttaatgcaggtgaacactcttgggcaagttcctccccccaagtgtgcacagggcctggggctgagcctaggcaagggaggggcccttcattccctggtcagctccttcctcctccttgaagtcccacctaggactggaccctggctggagtccagccaagagccccttccttccctcctccttccctcttgcctctccccagcccctactggcagcagcttccacaggagagaaggggaaggaaagggacaggctgagagctgggtcgtcctggaccacaccctggtggggccccgtgctatttaggtggcctcaggtgcagccttggggtgaccttcctcctctgcactctgcgaggttgtggcacctgcctcctagggctgtagggagaaggaaaggcaagcatttgtgtggaaatggcagatatgttgtaactgatgtccaagaaagttggaaacaacatttttattataatgagacctcattcagcaccccctttttggggggctaaggtattcctggttaaaatggaataagacctgctgggtggaggtgctggacagggcccctaggtcatgggaggtggaggagtaggaggaaggaggtgggccatgcctgggggtgccatgccctgggggggccccttaggggaggcatgttttgtggggcataccttgctgggcccagcgtgagcacataattagccctggctgttaagtccttcttcaccttctgaaggagtaaaggtcaactggctcctgtctgtgagaataaaagctgagcagagggagatgggaatgtctctgagtttggctgagcatgagctgtattccatgcactgttaggtacttaagggatatattatagcctcatgtattaccccactaattaaaagcagaaatgattatctttgttttgaggtgaagaaactgaagttcagggaggtgaaagtggcttgcttgtccccagcccaggagaccaaggtggggcagagagggaggtggtcgctgaagcccctgacagggtgggctgggatcccgagctggcagctccagcccagggtctgccaggaggatcctgacttgcacttggtcagtggtcacgtggtaccagagtggctgcatctgagtcttctggctcctggggtgaacctgagtgaactgcttgccatgtgccagcataattaactgaaggagcagagacttcccaaacatcatctgttcttgtttctccccaattcctaaataaacacttctgttgtaatagcatgttaatactacaacagttctttgctcttctgatggacacatggtcttttgtacaaacttgtggcttaagctcttcactgtcaactaaagtggaattcccatcaaattccctccaaggatcaatatccaggatggcctgccatggtgtttgcttttgtaaaggctggaaattctgccctaaagccagagttcccagtttttctgagtatgaagttccctttgcaatattgaacaatttgagaaacctttcatatgacagtaactatgttttcacaattcatcagtaggaaaaatgcatatcagcaaaaagacagacactgtgaattttgagacttgtctaggtgtcatattttattaatcacctcaacatctgacacatattgagaaataatggcctgtatacatatgtgacctagtattgatttcatttctagatagtgcatgtacatcagggattcacatataaagaaataaggatctgtgtttggataattaatatttgtagcctctcaaagaagtgggtatgacaggctctccttttgcaatttgctttttcttcctgggtactttgcttgcaatttgagtaggttccattagggggtgtcctgggaccacagcgcttctgcaattgatgaggctttcactccagctacaagacaaagtaccattttccccatgaatttttaaaaataatatgaattagcagaatatagcctaaaagaggtaaccaaacatgatcacaattttctttttcttttttttttttttttgagacagtgtctcactctgtcacccaggctggagtgcagtgtcatgatctcggctcactgcaactttcgcctcctgggttcaagtgattctcctgcctcagcctcccaagtagctgggactacaggcgcacactgccacacctggctaatttttttgtattttagtagagacgagatttcactgtgttgcccaggctggtctcgaactgctgagctcaggcaatctgcccacctcggcctcccaaagtgctaggattacaggcataagccaccgctcctggcctataaatttaaaagatgtagtaggctcagataactaaactctcttagtgaattgctgctcagttttattgaattctatatttcatttctttttagcttccaggcattaaaagtaaccctaagcatcggctagcctggtagagctttcagcattagaaatatacaagttgttttgtctgctcagggatcatgagacatcccaggcccctctatcctccctggcccctcacaagaagctctcggacccttgcaggcatgtccttccctccgtggccctgttttgcaggggaccttggcctaggctcccctgtgagggagagctaggtgtcaagctaattggagctgcatggcatcataggcagcttgtgcttgagctggtcttccctggggagtattctgggcatcctgcgctgctcatggcaggtccaggccagctggcccactgggcacagggggcacagtgccaagagcccattgtagtttgagaggcttgtgaaagtgttttaatttcttttctttcttttttctttttctttttttttttttttttgagacggagtcttgctctgttgccaggttggggtgcagtagcgggatctcggatcactgcaacctctgcctcctgggttcaagcgattcccctgcctcagcctcctgagtagctgggactacaggcgtgcaccaccatgcccggtgcatgggtgtattttgtattttagtagagacggggcttcaccatgttggtcaggctggtctcgaactcttgacctcatgatccacctgcctcagcctcccaaagtgctgggatcacaggcgtgagccaccgtgcccggctattttaatttctttagttggaagataaacactgagctgtgatgccttcttcaaaaagaaaagaaaagaaagaaatcaaaaaagaagaaaaacacgaactttaggtcaaataaaatgttttaatatatactattaatatattcacctttgtactgacacaatcggaaaatatgcttttgtaattgtttttttaagtggagcaaggggcataggagggtgagtgtgcatggggtccgagaaagtaataatgttgccgtgggtgggagtgggactcagggtctccatgacctggggcagagtcacagaggcaggaatgactccttacaggaggggctggccggtggcttggcgtagctgtgcacgggtgcaggaggagctgcaggagcacagagagaccccacctcagacagaggctgttctgtgagtcaagcagccctggcttctgagcacgtctcaggatcaagtgctcaggggcctcagccttagggattaccaagagatggatatgtgggaatttcaggaactttggagttttagctaagctaggaaaggatggatttctcaaatgtaggggagtggggttggtcctaggcccagcctggtcactcggggatgagacttacatttttgactgtgtatctttatctgtaaatgggggcaagaattcacccacgttcactgagggaacaccataatacatgtcaagagccttccgagcccaaggcctgcctctgggcactgcccagtgttggtttcctcctttgcctgtctgcattgtattattcaaggaaggccagggagatggaggtgcgctcacctgggacgcagattggcccagtatcggcaccacttgtggctgccctgccgcgccctgccagactgactcaggagggctgggtgggaccttctggggcttaacaagctttgcaggtgaatctgctctgtgactggggctgagaacttagcctttgcctgagcacgtctgggccatagtcaggcagacttgatttccaagacggggctcccaccttcccaagggagagaggattggctcctctcttgttggaaaggttctgggaccttgttgagaaggttctgggagtgcaggctgagcagggctggcatgcaccctcatccactctgcagaagcataaatgcttctttgtcctcagcctcatgtcttcctggagtacttctttttggctcagggagtgagcagggaggaacaggttctccactcctgaggtttctttgatccagtttgtcaacacgcatttgctgcagctgtgggcacagcactggatatgaggcaggatgacttagggtggggtgtgctttcacacttgacaggggacacagacacgtgggtgattcttatcacaaagtagattaaaataagtgctactgtgcaagatggacttccagtggggattcatgaatttgggttggggaggtagcgttggagtggatctagaggagtgagacccgtttccacaggcagggaagtatggggaggcttttccagctgggagaggggtccggtgtgcataagtgtgctgtgtctgatgggactggacgggtgctggagggctggaggggacagaggagtttcaaagtaagctgcagccagactggggaggtcctgtgtcccgcaggaaagtgctggcaccccttggtggtgacagccctgggtgcctgtgggatgaccgctcagtgaaggctttggaaccagctgtgccccatttgtgaaagctgcagagacagtgcctacacatgcgaagtatgcacagtgtagtcctctgcctgcaagaaggtcagtagatgtgacaggtgggcagttctactcatgatagaatcaaagatggaatacccaggaaccatactcatgggaagtgtgtacaatccggataatgaaattgtaccagggacacaaaagagccattgtacaggtagagatgttcagcgtgttccagcagtgggggatcaatatcttacatatttcggttgtttccaaattaacttatggatttaatgcaacccctagccagaatctgggtggataacttaccagatattaaaacatattaaaaaacgtattgtaggccaggcacagtggctcacacctgtagtcccaacaatttgggaggctgaggcaggaggatcgcttgaggccaggagttcaagacgaacctgagcaacagagagagaccccatctctacaaaaccttttaaaaattagccagatgtggtggtgcatacctgcagtcccaactactcagaaggctgatgtgggaagattgcttaaggccaggacttcaaggctgcagtgagctgtgatcacaccactgcactccagcctgggcaacagagtgagaccctgtttcagaaaaatttgtaaattcataataatttaaacagtttggtattgtgatggaaatagacaacatgcccatggaacagactagaaagactggaatataaaagttaatatatctggttactatttaaccacttgggaaaccatcaagccccttgctcatatcaaacccccaaatatattccatgtggattaaaatttaaatataaaaatgaaatcattgaagtgctaaaaataatttaggtaagtaagtagttaagggatgaaaaacatctttctacacatgataccagagacagaaaaaaagtctgcaacataaatgactaatgtattatataaacaactttaataatgaatatgaacaactcattgtgaatgaacttcttaatgagatagtgggtgagagatatgaattagtttgcaaaaggaaaaaattgtcctgaaattaataaggaacctaaaaagaatccgaagagccaaggcagtcttaagcaaaaagaacaaagccagagacatcacattacctgagttcaaactatactaaaaggctaaagtaaccaaaacagcatggcactggtataaaaatggacacccctttcaataaatggtgctgagaaaattggattgccatatggagaagaatgaaactggaacccctatctatcaccatatacaaaatcaactcaaaatggattaaagactcaaatgtaagacctgaaactgtaaaaacactagaagaaaacctaggggaaactcttctgatcattgatctaggcaaagaattcatgtctaagacctcaaaagtacatccaacaaaaacaaaaatagacaaatgagacttaaatgaaaaagcttctgcacagcaaaagaagcaatcaacagagagaacagacaacctgcagaatggaagaaaatatttacaaactatgtatccaataggggactaatatccagaatttaccaggaacttaacaactcaacaaacccacacaaaatcccattaaaacatgggcaaaggacatgaatagacattttttcaaaagaagacacacgaatgatcaacaagcatatgaaaaaatgctcaacatcactaatcattagagaaatgcaaattaaaagcacaatgagatatcatcttatagcagaaaggatggctattataaaaagacaaaaaaataacagttggcatggatgaggagaaaagggaactctttttttttttttttttttttttttttggtagacaacatcttgctctgtcgcccaggctggagtgcaatggcgtgatctcgtctcactgcaacatccacctcccaggttcaaacaattctcagcctgggcctcagcctcccaagaagccgggattacagacatgtaccaccatgtctggctaatttttgtatttttagtagagtcagggttttgtcatgttggccaggctggtctcgaactcctgaactcaagcgatccacccgcattggcctcccaaagtgctaggattacaggtctgagccactgcacccagccacttctacactgttggtgggaaagtaaattagtacaagctgtatggaaaacagtgtggagatttctcaaagaactgaaaatagaactaccatccaattcagtaatcctactgctgggtatctaccctaaggaaaaggaatcattattttaaaaagatacctgcacttttatgttcatcacagcacagttcacaatagcaaagatatggaatcaacctaagtgtccattaatggatgattggacaaagaaaatgtgatatatatacacagtggaatactattcagccataaaaaggatgaaagcatatcttttgcagcaacatgaatggaactggaggccattatcttaagtgaaataacttagaaagacaaaataccccatgttctcacttataaatgagagcgaaataatgcgtatacatggacatagagcgtggaatgatagacattgacaactgggaaggattaatgggtgagagatgagcaactacctactgggtacaatgtttgggtgatggttacactaaaagcccagacttcactacacaatatatccatgtaacaaaattgtgcttgtaccctttaaatgtatacacattttaaaaaaggaatttgctcgtaaaaggagaaataaatgtcagtaagtgtgagaaagtcaatcttacattaatcaagtaggtgcctattaaagtaagatactattttttgctattaaattgacaaatttgtggtgtgctttgcttttgtttgtttgtttttgtgaacgatggtactcaatgcatgtgaaagtgtttggcaaggactctcatatgccttgggagaggaagctgcaagctttctgccaagcagtttggcaggatgtctcaaaccctttaaaagaattcctccctttatcctggggattccatttctaggaatttatcccaaggaaacaattaaatctgcagtccaaaattcctatgcaaggatgttcatcacaatgttacatataaaggtgcagatttggaaggaatttgaacatccaatgatggggaatgagtcattcgtctgccggagtgcagtgaggcccttaggaacatttctaaaggatgcttagtcacaagggaatgagggaacttcatgatctaaggctaaatgaagaaggcaggaaggatagtgggccgagccggagggagaagaaggcccatggggaagaggcaggggccagtgccaagataggagacagaaggtgcaggatgtgttggagggcaggctcagcttcatttcattcagattccctttagtaaattctgattgagcagatactgggtgcaaagtactgtcatttaggctcagtttagcaaaggagatggtttgggtgaagtataccgaaggacaggtgctgaccccgggtaggctcttgctcagggcaacaggcagctgctctgccctgtgtccatgcccccactcagggactcgctcctctcctggcctctcaccccttctctggggagctgctgtcttcacctcctcttcccagggtgcatagaacttttaaaattaaaaagaagaaaaaaaattcaggataataaaactttttaaaaagagaggttgtatcctacattaaaaaaaatgatatttatgtgtgggagtagggaaaagactggaaggaaacatataaaaatgagatttctggttagctgtgatagaattatgggagatttcatatctttctatatttttataatcagcattttttaaaaaaaacagctttattgaggtatcattgacatataatctgcacacatttaaagtgcacagtttcatacatcttgatatatgtatatacctgtgaaaccaacaccatgatcaagatagtgcacgtacccatcttccccaaaattcctcatgcacgtccataatccctccccagatcccctgtagggcaacccctggtccactctctatccctattactcagttcacactgtttcctaggatttggcttaaatggaatcgtgcgctttttggcttcttccagcccatgattattttgtgattcatccatgtagttgtgtgtgtcagtggtttcttcctttctgttgctacgaagtattacattgtgtgggcatagtacagtttttctaatccaatgaatcacttgataattaggaaagtctcccctttttgtaagcatgcccagagattggctagggtcctgggagtttggatctgtgccatccgtctgtctctgtaagtttgggacagttcctcaggcctggcccagtgaccctgagggcaatggcccggccagcccagtgggcacctgggctgtcattcgtcaaacacaaggcttggccatgccttgaaacactcaagctgcctagaaagcatgtcctcatggtcagagctttgatttgggtgccaggaggtttagtggtggtcagcggatgtgcttagtaattgcctttgtgccttgcctcggtgggagagttggagaaagcttgatgtcttgtccgaagttggtgttgcctaacttccacgtgtcactcatgcccttgcctacacctatgtgtggctcacagctatttcccccacccccagcaggcagcccaccctctctgaagagcagtcccctctttgcctgcccagtgcagcccctaccatcactctgtggctctcgtccttcacctggcagagctgatggctgtccctctgtgatctaggtgactttcatgaggtctccctgtctcttggattagcacagacccaggcagctcctccagggctccacagcaagtcatgttccaccagtccccgggcatccctggtccctatggtcccatggcctgctccctgccctgtgccttgccccactcatctctgagggttccaggaggtgcctcccacacactcagaaaagaaactgctatgatacctgctccggtcagctcctggcactgcctccagggctgaaagggaggacttagcctgtgctgttccgtgtagaaaggggcaggtggccagcacctctccagcactctgtgcccccttgtctctgagcctgagtctcctcaggtctggcacgtgatgtccttttctgccttctcttatcactccaagcatgagttggacccagtcctgtcctggtcgaccttcctcccctcattatttctctactttgagcagcctttgccaaccccctcaaaaccactcatactggcagggacctgtgactgtgaacagaggctggtgccaagaccctgggtcttctatacccggggactctggacagcacctctttgcccactggacaccctccaactgcaaacagcatctcctggggctgggccctgctctgggagcagccttccccttcttctctctcaggggcctggagtcctgggatggtgctgtctaaccgggcacaggaggaagagaggctggctgcccagggactccctctggaggagtgctagtggacctgtgcccggagccgcccagcctcaggcctcagtccatgtccccacgttcagcagagacactgatggaggggtctgttggcaggagagccccagttgtggggccagcgtgaagctccatgaggtcgccagccggctccccagaagcaggcgaaggctggtggggggcaggggacagagctcctctgtgccctgcgcaagctcctgtctttaaaaaagtctcccttgaagaggatggaaactaacagtaagctgtcctggcccatatccagccatgtaatcttagagccccccacctcagcggggacaggactcaacttccgtaacctgatgtctgggtgagggctgcaggctctgctggaagctactgcagggctcctcctcatgctgtgggctcaggcttgggccccaaccttgaggggagggtggagggagtgagggggtagggtccagcccaggaaacaggcctgtgaggaggtggtgctccttgctgtggggggctgggagctgggccagcaggaccctgcgagttgctcaagggccccttcccatgtctgcaattacaattacctctgaagtgaagagcttcaccaacacagtcacctgggtccttggggctcctgcctcctccccctacctggctcctgcctcggcttcctggctcctagtcatgagaggggcatgggcaggcagccagcctcttactggccagatgatgctgaaagcctgcattgcagaggtgattgcttagcctttcaacagggcacatacaatgcccattctgggagggaggcagccgaggcttccatgcattcaggacctccccaggtcctagggctgcgcataaagcgtaaaccatggagttgggtctgaagctggctttatattctccccatctcatcctactgggttgctgcaggatcacctgccccaggccaggtgccttgccagggctctcacatagcttagctgattgcatcctgtaaacaaccctgcaagaaaaggattgcctgaatcttcattctaacgactggggaggctcagagcgtgtaggtcacttgcacagccatgtacatttgctagggctttctgctcccgaagaccatgctttccgtgactcctcagatgcccagacctgcctttgggtgggaggtgtggtcctgagtgactaagggactcctgggtgagtccatcggcttggccctctgcctgcaccctccaatctatctcctcccagccagccccgtgggtccttcccagtctgaccacagtgcttcttgtgtctgagcccttccccacactccccacaggctccagtcttgtactccctgttccccaagcactcccctaccacaggcctcacacctgtgtcctctctgcccagggacctgccccgctggctgactgcccacggaccaccctgagtagctttgccagctctcttcccttcccaccccccgacagaggtgaccgttctcatgtggcttccctctagacagcactccacacacttcctttacaagtgggttacagacatgcctgtctgcctcctgcacagactgaggattctcaagggtggggatggcaccttaggttctggcatactcagagggagagcacatagtaggtcttcaggaaaaggttttcaaataagattgcattgaacttctggaggcaaattatctcccttcttttctgatcaaatggtttttatgtttgggaaatgtggcggtagtgtaagaatttgccacatgctgaaataggtctcagtgataaagagtaacaggtttaatttttaattccaggttttaactccatgattgtgtgctatgagtatatggctgcatgtctcaagaaattcactggctttaaaatgtgggcttagctactgccagtatgatttgatgaaagcggatagaggtctcagatccacccccggattccaccgtcaggcccaaggacggacccctggccattgactgatgccaagtgggtgcctggcagcagccttccttcccatccctgcttctggacgcctcagccgtgagtcagagcatgtgcagcgtgggcttgtgcgggtggcagggagcccagaattagctcagctgcgtttcagcaaggctgcaatggggagggggaggctgtgccaggcgggggctgagagtcagcaccctcaaccacagtgggggtcggctctcaggagctgtcatagacctcagggcattcagggaaagcctgctgtgagctgagcacaagcccgatcatagatgagcagagggtcaaaggaccaggccttgcaaagccgcagctggtgtgacccccgcctgccggagacaaacatggaccctgcatgggtgtggccaggtcatgcctggggatcgagtggcagacaggtgtgagcatcaccgagctcactgctcacagtctagcagagacggctggctcagtgccttcacctacccccagcacacccaggcaggcagagccagtaccagacaatgcatcgcctcctgactggtgttctttcactctttgcgaactgcctttttgttaaaaggcagagaattgttagcacaggtactttaatatattgcaaaatgttttatttgcccttgcgcctttcctgctcattctaaactctggcacaggtatgctgcccaggacgccagtggttgtcacaccagaaaacaggggagcagcacttgtcactctctgctcattagggcaaaatgcagggtgggttttgtgcctcccaggggtgtggaggggtcaggcacttgtgtcaccaccaaatgagtcagctagatggaacagtaaaatatttaatcacaagcgtgtcagcattgttctagaaaaacacatctctagaggctgtggtatgtggtatgggcacatcatgttacctttgtgggtttcccgtagccatatgcgaaacacacacggagcagggattggtacgtttggggtttccgtgggtttaattttgtgagcaccgcagactgggaggaaaacaaaacaccctcaggttctcggggtggcccagcttggaggctaagccagatggtttctgccctgacctgtccttggtcaccagcattcgggttcacaaaatcagggtgggctggctgcagagcattgataaggggccacccaccagctccttcaggtgggcttgggagcacactgtccttcaggcgcctcccttcctggcactggcacccctgactgggatctggtccttctctttgatctttggacaacgcgtgttggatgacaactgggcctggcacacgaagtgggaaattctcaactgtgagagtctgagagcggggaccttgctgccctcagccttgtccctgcggagcctgatgtaatccgtggcatgtggaggccccttgctaagtgctgtggactccgaccctgtccacatccctctgccggtaccagccccggaggcattgtgcaaagggtctcacacatctggagaaaccctcccactgatgtagcctctgttctttgcaaggcccagtgtgcacccagcagtctcgcttgagcccccgtccactatgagggaggcagggccagaattcatatgccccttttaaggacgagatacttgaggcccagaaagcagaagaggggtgtgcctgtgacgagagcaggagcacgggcgtgggggtctctcacctctcagttcggcacctcacccaggtgcctgctgctcccccgatgcttggcactgtcctaccaggatgtgctgctgacaacttctcagcctccctttaaaaataaaggtgtcttagatctttctgattctctgtgcccagcaaactcactggaagctaagcccagaacagcccctcttttactgagtggtaattccctgcaaccttgagctcaacaccttatttacatcgcctcatttaatcctcctgtcacccgtgagaggaggcaccacattattggctccactttgcagaaaaggaaatgggccctgtcagggcaaaccctggccgaggccaccagcaggtgaatggagctaggcctggtgaactgcaaccctgagctctgatggcaggtgggtgtggagggagggaacactccaactcccactctctcggctttgaggctcctccttcttttgtagaaacggttgtcattgtgagcagagcagactctggttttgggggatcctcaaaacagtggctgggaaacaaggagcattatttatttatttatttatttatttatttatttatttatttatttattttgagacagagtcttgctgtgttgcccaggctggagtgtagtgacgtgatcttggctcactgcaacctccacctcccaggttcaagtgattctcctgcttcagcctcccaagtagctgggattacaggcatgcaccaccatgcccagctaattttttgtatttttagtagagacggggtttcaccacgttggtcaggctggtctcgaactcctggcctcaggtgattcacccgccttggcctcccaaagtgctgggattacaggtgtgagccaccacacctggcctcaaggagcttcttagttttcagaggtgagacagtctcctcttctcaatggggaagtgggaggtcctgcctgagggtgcatcccagctcacagcccccttggtaagaggtctctgaaatcggcttcctgcaggtaggagcagctggaggaggagacagagccatccttccgaggtgggaagtggtgccaagttatagggaaagtgcgatgtgggagagatggcgttactgactactcatgatgtactaatccggaggggtgggaatcggggcaaaatgcagccatttcctgcttcagaattaagtttcccctttttgaaagcggcccaagccccgctacccattccttttgttgttggcttccgtagctactctgctggccctctgccactctcacttatgggctttgtacctcgagacaggctctgtgagtttacaggtggcagaggaacaagattctcctgcctgtaagggaaccagggaaaaagagcaaagtggccaggtggcttgaggtgtgctaacagatggagcgtttggtgccaggcccgttccctggagaggccagctggtctgggtgtcaggtttcagtgggccttagagcaggcgggtcagcagcagaaatgtgctggagggaggaaatgccatttgcctggccagtgtttgctcgcgtcctgcagcctgacagctcaatttgtttgcacccacagatttcatgaacagtggtttgacgacggttgcttgggtccagattacatggaaacatttagaacctcccctgggattgcatccttatctcgtaatcataactgctttctcagatttgtaataagggttttcctgaacctgctcaccccttcttataagttacagcagtgacatcgcagtttttatgtgtaaaccagaagcaagttgaaccaaaataaagaaagcaattttgtgaacaaataagttccccttgagaagcactgggaatcaaatgcaaatatcataagggacagttaagaatctgctgttgctatctagggctcatgaatctcctgatgtgcagagaaaccatacatagcaatcgcttgacagctttctgccaatctcttctgaattttcactgaagaaacctccccagagtctcagaggaagcagagctgctgagatgctgattcactgtgtgaggcttaaactcaggacgcatttatacatcctgtactctcagtgtttgcatgaagcttttaaacacggggctgggcaagacaagtttggggcagtgggctttttccgtgtgtagacctctgaacctttaggattattctggctgtgcaaatttactgatacaaataaatatagggactctggctaggctgagagaaaacagatgaggtatgaatgaaatttatttctgtacagatggacttttagtggaaattgtgaggctcactccacttcccaagtgtaggtcccagccttcggtagactctgaatgtcgttgcaccactgatggaggcaacaccagagaggggaaggtcattggactgtaagccaccttggaaacccgagccttggtctgttgtccagggcaagtggcagcttgtaccagggaagggaggggacagaccttaatggagtttatctgcctgataggcatttgcagcaatagagtgagtttggctttgggtttttgtttgggctgataaaatctttctgttcacttccaagctgttgggtcgacaggctatccacaggctgtgggatgggagaaactgtggagccatccagctgtgtggccaggaaggatggctagcctctcccctgccagactactcactgcagggacagggcaggcatttgccaggtaaataacttttgctggagggttgacatggaatggcatgtgcaagagaggcggtgtgggacccattcctgtcccacagctgagattttggaattgtctggaagagatgccctacctgagggtgacctcggagctctctctaggccacacatttaggctcttctgttcttgtggcttgcctcccagttgagacagccagtccgtctactggttacagctttgaacatgaaaggagctccagggtactggcagctcctgctacggagtggctgggctgggccagaaaaaccatgaggtgagatcctcccattccagcttcaaaactgcatgttctacctgacgtcggagatgaaaactggccttctattcccatgggtttattgaaggtacacgttttactcctgatgccttgcaaaatttgcagagatgtttaacacgtgcagaaacattaggttttctgcttcaagaaatactccctcatcaccctttttcatctggtcttagtgtatgtagttcacctggcagtttcttctatgcagcaaccagagtcaccttttaaaatgtaatcagacttccaatcccagacatgatggcataatgaatatcagacttactcttctttcccaagcaattgtgatattggacagaatgcatgaaggaactgttttcgagaatggaacaacactcagtgcaggtctttggtccaactggaagcatgtgagtcaagccccacattcactctggctttctgtctgggagtgccttcaaaaccaaggtacaagggaagcagaggccaccagagagctgagcacaagaaaccgagatcagagtgcaggcagctggaacttgcggggatggtagtggagaggagggttctgagcagagaagggacttcagaagtcttcaaagtgatcttgagtcttggccaaatgctaagctgcatttgcacagggaacaactctttgaggctcggcagagaacaactactggccaggacattgtggggaggatggtgagctaagcacaacctggaagtcacacagtcacattgtgctgggagactaagagtttttgttttgttttgttttgttttgtttcctgagatggagtttcactgttgtcgcctaggctgcagtgcaatggcgcgatcttggctcaccgcaacctccgcctcctgggttcaagcgattctcctgcctcagcctcctgagtagctgggattataggtgcccaccaccatgcccagctaatttttgtatttttagtagggaaagggtttcaccatgttggccaggctggtcttgaactcctgacctcaggtgatcaacccacctcggcctcctaaagtgctgggattacagttgtgagccactgcacctggccaagacttacagttccaatctgctagagtgaggagaccttactgagcaccttgaacattgaatctgagatcacagaaacgtcatacattaggaataagactgctctagccccaagaccacgctaaactctccataacaaaacctaaaaacaagccttgttaggatccagatgctatgccagtcaactaactctctgccagaataaaactcagcactcttcaaacaaattattatctgcaatatccagcatacaattaaaaaaatcactagacaggcaggacaatgagactaataacaaagagaaaaggtcgataaataccaacccatacaaacatagtgagtgcacaaataggaatttcagcagagaagtggcaatttaagaaacaaccaaatggtaattcccaagctagaatatatattatctcaaatgaggaattcactggttggatggccaggtgcaatgctcacgcctgtaatcccagcactttgggaggccgaggcaggcggatcacctgaggtcaggagtttgagaccagcctgatcaacatggcaaaaccccgtctgtactaaaaatacaaaaattagcctggcgtagtggcatgcgcctgtagtcccagctactcaggaggctgaggcaggagaattgcttgaatcggggaggtggaggttgcagtgagccaagattgcgccactgcactccagcctgatgacagagcgaaactctgtctcaaacaaaaaaaaaaaaaaaaggaaaagaaaaaataaaaagaattcactggatggatctaagagcagtttggacactggcagaagaaaatgtcagtgagcttgaagacaaatcaataaaaaccattcaaactgagtcacagagtgacgaaacactgaaaagaaattagcagagccttagtgacatatgagagataatatcaaatagcccaacacgtgcaattggaatttaggagatgagagggagattggggccaaaaaatatttgaggaaatttctccaaatttgatgaaaaaatatcagcctacagattctagaatttcagggaacccctagcagggtaaacttaaaaaaaaaatcacacctaggccgggcatggtgactcacgcctgtaatcccagcactttggttggccgaagtgggaagatgacctgaggtcaggagttcgagaccagcctggccaacatggcgaaaccctgtctctactaaaatacaaaaattagctaggcatggtggcatgtgcctgttatcccagctactcgggaggatgaggcaggaggatcacttgaatccaggagatggagcagagatcgtgccactgcactctagcctgggtgacagaacgagactctgtctcaaaaaaaaaaaaaaaaaaatgaggtaacaccagtcttagactaaatcttttacacaggagggagtaacgcttcccaaataagtttgaggtcagtgtgttagtccatttgtgttgttataaaagaatacctgagactgggtaacttaaaaagcaaagagttttaaaaagttgttataaaagaatatctgagacttagtaatttataaagcaaagaggtttatttgactcatggttctgcagactacagggaatgtggtgctggcatctgcttctggtgagggcctcaggaagcttccaagcatggtggaaggcagagggagtcagcatgtcgcatggcaagagaggcagcaagagagagggagatgagggcccagcctctctcttttttttttttttttgagacagagtctggctctgtcacccaggctggagtgcagtggtgcaatctcggctcactgcaagctccgcctcccgggttcacgccattctcctgcctcagcctcccgagtagctgggactacaggcacccgccactatgcccggctaaatttttgtatttttagtagagacggggtttcactgtgttagccaggatggtctcgatctcctgacctcgtgatccacccgcctcagcctcccaaagtgctgggattacaggcttgagccaccgcgcccggccgggcccagcctctcttaaacagccagatctaggatgaactcattactatggggaagacaccaaagcattcaggagggatccgcccccgcgaccggagtgcttcccaccaggccccatctccaacattgggggtcgcatttcaacatgagattgggtaggggacaaaatatccaaactatatcagcaggtataaccatgattgttttaaaaaggaaaagaaattacaaaccaatattcttcataaacatagagacacaataaaacaaattgagcagtgagggggcccacatggttttgttcttcttgaatgaaacgaaataaattaaaggtggctttgttcttcttgaatgaaaattgaatcaataaacactcatgggtccattgtcacctggaaggctgggcattcatatgcagtatctaattggatcctcaaactggataagaaaaaatgacgtcttcatctgctcagatgaagaagcaggctgagaacaatcacgtgggtttcccaaggccattcccatatgtggtggctcatcagggacaaggatccaggtcttcaaacggcaaggccggttccctgctggagggctcccatggagagacttcctgtgctgaatgaatgatggggtgtgtggctgggacagagagtcacatggcaactgtgatgctgtagtaactgcagtggggagcttcctggagatctgttcctgaggaaaggacaatgagggtgtacctaagtaaggaaagggattgcaatagctcagtggagggtgcgtggaaagtgggcccctcgatcacactgttttgtgttcagtgtctgaccgctcagtgttccttctgtttgtataactctctagggatcattttaccctgtcctcacagcatttgaggctgacgggaactccaagtatcgatgacacctgggatgaaagtggctcagggctctcttacatgaggctgtgtccctctgttttgcagatgtctttctgggcaccgagcagctaggggacatgccagagatcagacaaaggagcgtcacccaggctgagggccgggagagcaggacttctgaatgcagcagcatttcttaatcacaggaccacactcatgtgtatgcacgtggacgcgtgtgcatgttgaaggatgatcctggaaagaatatctttttcttcataatttagtgatgtatctgacttaaaaatgactactgagactaacttcaaaagcaattagagggggaagcttgtgagaatatctagtgcattttcagagtttgaggttaatcagatgcaaatggtttcatcattggtatattggcacattaggaaaaagaattattccttgatttaagtgtttgcagtagtttaaatcatctgtctcctccgcatgcccactgagaagtggtttcttccgcaaggtggaattatttaacggagtgaggtgaagacgatgtccgctcttatgcctcactgagaaacagttagaggactcctttatttttttcttagtgagatttttaggcatggggtgaaacaaaatgggtttgaaatcagggaatttttacaagcgatgtgtcttgaaggtgggcttttggcaaattgaagacagcgggtccctcagccccccgatcatggtccatgcgcccccagggatggagcagtgaacgcactcggtgtgagccttgccgtgagtctatgcagcagtgagggaagctgaggcccaaagggagctccttgtggcttcaggctgttttgatcaaggtgctgaatctgccagttcatgtgaagccccggggctcggagaagtgagctctccgcaggcttctgcatcattgaggttaggtctcctaaggagcagaggctgatcccatccccacagcaaatgggcaggagcactcgggtcatagggatgagggtcccccgcctgctgctgtgcagttgggagagtgtgctagcgcggccctgggggtgcaccccaaggggaagggtgttttcatctcaggatgcgaagcttcctggagggagtggtaaaagctggtcgtaggctctaggacagtcggttcgttttcctaagtagaggtagtaaatgtgggggcatgttttctggggcttctttgcctaccttgggagagaagacctgtgggccaggatgtcttctggatgaagaagtgacttgagcctggaatactgagatcgggggtgactccgggtcccagaggccagggaggctgggccgtggcaagttctgagagtttgcccggtgatgagaggcctagctagcacagggccctctgtcctacagacccttccctccagctccagggatggtcaggccccggcagtagccagcgatccccacctacgctcattttatactactttgaagccagaagcctggtttatgaattgggagaggggatacatctactccgaagaccagaacgcctgtgcccactgctcaggagcccctgacacccccacactcaggcgccccacacactcggggagcccacttcatattgatcagatcatttgctggcgtggctggagtcctcaagggaaaggtcttgatcccgtctcagcagaaggattatgtttcctggctgagaggcagggtcatcacgggccttctccggaggcctgactcggggccctgcaggcagagcaggggtgaaggctgccggagaccccttcagcacagggctggcagcactgagagaggcgagcccacttgtgtccatgactacacctgtgctgcctcctttcattgatgacattcttcccttgtgccgtatgggctgccctgacctataaatctcatttgcgagctgtttccaagtcacagtttaggatcggtcagtgtcagagtcactagccctggttgttccctttgtagacctttggaactttttacagtggagaatggccttttctgactgtcctggcatggggggctcttccatctatgacgtcccgctttctcggttggtgtccagacttcattgcgcccacctttgttcgcagcttctcttgtgttcctgtcttactgcttcgcccggctcgcgagttcttggggaggggctgtgtttgatcctgatgtgcagccagctgggcgcagtgtgttcccagcaagctgttgttaatactcaccagcaccaggtcacttgttgttaatactcactggcatcaggtcgcttgatgcacacccaggggggttcactcaattttgctcattctgaccccagattccagactctaacaaagaggccctatcccagagtataaattggagactctagactgtctcttttgtgattcaggactttgagaagacataggatttctggagaactgcaggccctgtggtctgatgtgatttttgtgtgagatcccgtcacacatccaggataaggtgccctgtgggctgtgctgtccacctgcggcccccagtttgcttgttggttagggcctcaggccacgtgggctggccacccaggtcatctgctctgcccttcagggctctgagctctggatggggggagccctgggactgaggtttgtgccatgccctgtgatctgtatatagaagatcagggttctcccaagcactgtgttgggcagatcttggtgggaactaaaaccagaggtcctattgtgtcatgctggcaactttcccactgtggcagaggctcagtggcccatcatggtcaaaatggtcaccatttattgagccctttctatggccaggctctgtgccaacacatcggcatttaactctcaacaaccctgcaaagagggatgagcccatttcacagatgagaggggttgcagaacctgtccaaggtcacggtactctaagtagtggagccaagggaaaaactcagggctggcagagccacgtgcttttacatgcttgaccctgtgcgccaaccccattgcttgcagaatcgctttctgtcctaagtgaggggaagggctcagcgctccttcctctggagcttgacttccttcacctgcctcctggcaccattatagaaggtggagccgggtgaccttctccttcactggtgaggcaccctcccgcagccacactggagtctctgtttcctgtgactgatctgctctgcccaacgaggctgtggagtggagtggccagatttctccctggctgggcttgggcccttgcgtcattttcagggtgccaagtcaggatggaaggagggtgctgagtgttcttgagaggcctgcctttctccatctcttgggaccaaggagctgacaaacagtactttactaaacagcaccgccaccctccacacacacgcatgcacacacacctgcacgcacgcatgcacacgcccacacacatgcacaaacgtgtgcacacagaggggacaggccctactcccacccctgttctttttctcacctagtcccccagactcctttgaaaagccagaggaggagggtattggaggtgtggttgctgggtgggttttgtggcctgcctctgccacaggggtaccagggcactcctcccactgagcctccatcctcctgcctcccctcccactgagcctccatccccctgcctcccctcccactgagcctccatcctctgcctcccctcctactgagcctttgtccccctgcctcccctcctactgagcctctgtcccctacctcccctcccactgagcctctgtcccctgccttccctcctactgagcctctgtccacctgcctcccctcccactgagcctctgtccatctgcctcccctcctactgagcctctgtccatctgcctcccctcctgctgagcctctgtcctcctgcctcccctcctgctgagcctctgtccatctgtgtcccctcctactgagcctctgtccatctgcctcccctcctactgagcctctgtccatctgcctcccctcctgctgagcctctgtccatctgcctcccctcccactgagcctccattccctgcctcccctcctgctcagcctctgtccatctgcctcccctcccactgagcctccattccctgcctcccctcctgctgagcctctgtccacctgcttccccactgagctaagacttctcagacatacttcttaacagcgccagcctcgggcctccagcatcaggccaccctggcctttcagcccttttctctcatttcctccatagatgcctttttttttcactccagtctcactgggcccctctgactgctgagcacatcttgctctttgccaccagtgccccctgctagggcactccccttgcctgtggggccacccctggccattccctcactgtccttcaggctcaactgcagtcccaggtgttccacacacatgggatcacagcgtctgggctgtccacttggcacctgctcctgcactgccgtaagaacattcttctctttctggtggagactccttcaactgtctatgtctgctctccctctgactacaaggtcctatgaggactcttgtgtatctttgtcacttgggtgcttattacatacttgtacatttttaaaaggcttaacgtctgaggttaagagctcttgtgtcacccctttgtgtggcccagcggcccgcaggctggcagaggagtggctgcagggaattgcttcactggagtctggggaatggtctggtttgcatggtggcaggtgaatttcatgttcctgccaccaccctgccttggtggggtgggaggggcacatcccagacatgtcagcttgtttatattcaggtccctgtttggtttgacaaagcagagggtgtgttgctggcgtcttgactttagggaggcctggtagccatgaactatcactggggatttttcagttacaacaaaaagaggctgtgaattgtgacccctgtctggatttcagcctgtcttcccccttttgggagacgattaccttctggcagaaataagtgcattcatcttctatttaagaaaaaaaatattatcttctttgaaataggctcttgctattctaggcatgagaacaggtcagcctttatgctgcttaaacacagcggcggcggctctgttgcactcatccttgaggcacatagggatgggacacgtggcctcccttcctcatccgcacaacggctcagtttttctccatgttgtcagaaagacgctcagggcatcgtgggccctgctgagctctagacaatgtgggagccacaggcagatgctgtgggtctgggcagacgagggcaggccaaggaggtcagactcagctcccgcaagcccatctgactctggtgcatgtgccctggccccgagcatgctcactgtgaccaggtaatgtgactggaggtgtgccctacctgactgtgatgcgaagagctggctggtcaccctggccctccgttttttgaacttctgcgacatttctcttctaggcctcacatttgtcacttgtcacatgacaccatgctttgatgcttttactgtgggcatgtcttctctccccacgctcttagcgaggtgacctctctgaggcccccacattgcataccaagctggcttgcccatggctcttcacttgagtattgatcattgctgttttttctcttttatgtgtgaaatactgtctgagagttaagcctcacattcacattccagtcaagggaccaacagaggattttccttcagcggatttcatcatctttgtatcttgacctttagagttgctagagcctaatataactaactcttgattctttattatgaattcaccattttggattatatgtgacaacctgtaaatcccttagcagcttccccagctgcattgaggctccttgacccacccactggtggcgaaagcttggggagcatcaggattttaatggaacctaagcaaggtgcagagagggcagtaataagccagccgctgaacctcacagtgggctccgcaactgggatctcctgggactgtccgcctggagggcaggagctgcaccccctgtctctgtttttagtactgtgctgtgcacaggcaggcatccagtaaatgtttgctgggtacattgtcaaacaaggatattatccagagttgccttctagctcaaaagtctgtgaacagctgaacccatgattatatgcacctctagtcccctcttatttttgtgggaatggtaaggaaaaactataacttgagtcttaactatatctcccaagttaggtttgtaaataatgaaaataaaggttaatttttctcctttcattggattacatggaacctccctactttaggaatctaaagtgaccagaaaaagttatgaaaccttcaaggttttggtgttttgctcatctgtttcagcagaagtcactgattttctgcatactccatgtaatgaatctggtatgctgagataaggacacctgtgactgagatgatttctttggcgtccgtgcaagataaaaggtaggtgctaagaggagcaaggcaaatatatatttagcgatgctgtcagtgccttcacgtttaataccagaagggtaaaaggaacaaaccaccggtacatgcaacagcttggatgaagctcaaaagcatcacactttgtgaaagaagccagtctcaaaatgttacatactgtacgattccatttttgtgacattctcaaagagacagaacgatcgtgacggagaacaaatcagtggttgccagggggaagagtgtgtggctataaaggagcagcatgggggaggattttaggggtggggtggtgatgggacaattctgcatcctgactgtgctggtggctacatgactctacatgtgtgtcaaaacccatgggcttgtatgtcaaacccaaggccgatttatggtgctatcctttagaaataacgcaaaatatttccagaagggtgagcaatgcctgccaggggtgtccaagggagagagagtacagtcatgggttcttagtttctatttctggctggtctagtaaagccccttcctcatccctcttttccacttatcgctagagacagaaactaaaaaccatggcttcaggctgctaaaagcctaaaagaaaacaaaacagaacaacaacaacaaagtaagataggttggacaagcttggtagtcactgacaacaggctcagaccccagccctccctccagacgcagggtgttggttctgtgctgaggtttaaacacatccccagcctagggctcacttccatgttgtgagtgtcaatcattctgccgacagcagctgtcaggactccctgaaggtcacagtctggtttcctctgctgcataaaagattgtggagtttgcagctctgccccagacttgccccttaaggtgaatgtagggcacaggtttgggtggattttttttgggccactctcaggatttatttccttttgagactatttatatgaatatgtttgtttatatgaaattgatgaatttagaagagttattcctgttcagctcttgatttattcctctgaaatattttcttgtctgaagtcatgcatgtgtccaaaactctccccagcacagctgtgtcttgtctcagcgagggactccaccatccactctcatgcccgcatgtgaaacctgggtgcatgcttgccgtgtcttctcctcacttcctggccttgcttcaggcaccgtgtcctgtgtgttctgtcctcaaattggcctactcctcctgtcccatgccaccagccagccctcctgccacagccccccactcccggttctgccctgtcttagtccatttgagttggtgtaacaaacttctggagattgtttgctcacagtcctggaggccggaagtcctagatcaaggcgccagcagattcagtatctggtgagaatccactttctggttcgtaggtagcaccttcctgctgtgtcctctcatggtggaaggggcaagcgagctctctgggttctcttttatcttattcatgaaggccccagccccatgacctaatcacctctcagagcctccaccacctaaagccatcagcttggggttaagatttcaacacacgaattttgaggggacatgaacattcagaccatagcaaccctgtaaccaaggggatggatcttcctcacagttgaatttgatcatgagatcctctgactaaaatcttgccgtgctttaattacctttagaatagaatccaaacaccttagcatggtgtaatgttctggaatcatctagccccctctacttagttcccttccccaccctaatccagctctcaaaacttcagtgatactgaatttcttccagggccttgagcaggttatgttcccccctgcctccgggcctctacatctgccattccctggacctggaatctcgtcttccctgttctttccctccttcccacgcaccgtatttgtctggtatgttttccgttcacctgtccaacttcagcctagttctgtcttccaagctgagcgtccgtccttcctgccctcaaaaccaccaatccttctatcccagcacctgccccactgtgtgtgtcataattctagatctaggctataagatctttgccatcaaggccctccctctgttgtcactgttgtatcctaggcacctagcatggtgcttgtagctagaagctgctgaggacaaattttctgatgaatggacagaggcatctatgagatcccagagccagccaccaacaggaatatttttgtttttttttaagacagggtctcctctgttgcccaggctggagcgtagtggtatgatcatggaccgctgaagcctcaatctcccaggctcaagtgatcctccaacctcagcctcctgagtagctagaccacaggtgcatgtcaccacacctggctaaatttttaattttttgtgtttgtaaagttgagctcttgctatgttgccaaggctggtcctgaactcctgagctcaggtaatcctcccacctctgcctcccaaagtgctgagattacagacatgagccaccatgcacagccaccaacaggaatgtaatcagtgacatctaggtgcaggtcactgtcttcggatttgcttacattctgcttagggagatcataactgttgacatacttgaaaataagtgtgttaaaccacgggacatgatctccagatgccatccagggagaggacagaggctgaggagttgaggctgttggagaaggttctcagagcttctttccccacaccgtttcttgcctgttttctcattgcgtatatataaatatattggcctcacttctctcactacacagattgccacccactcaccagtgctgggccaggagggcccgccccgcacccctctgtgcgtgactttaggtaactccgaggattttccatcgtacattgggaaatcacatctccggctattttatatggccactctgcccagcctctcaggttcatgctgcttttatgtggtgtggttgtgttgttgcttctgtgtgctaattcacattgacgctcttcctcatgtggcctctcctgagccatctctctccttcagggtgacttcgcagccaaatcatttatggagatgtgatgggagggggtgttctcaccctcttcccactctgctttccctccccctatacctaaaatatcgctttccgcttggaaagaagtgtcttgaatcagagcttaagcagaagcattgctgattcgaactatatagccagcgccactggcggaggaagaggaagtggtgtgtaggggaggtgagtgcaggcacggagtagctgagtgtgctctgggccctgttgagaggagcaagcccattgcttcttgaccctggctgcccctcggaatctcctggggagcttgaacacagcctgatgcccacgcccatgcccagtgaattcagtcagcgcctctgggggtggcacccagggtctccactgtgtggtgcacgggcgttcgtgtggatgcgatcataagtatttgctgattcttatgccctgactgggctacccctgacggcatggatttcctcagtaaaagacaacctgttcaaaatgagggggacagaaatagacgtgggagacttccttctttttaactatcgcttaattacatgatgtaattgggggaaaatacactacagaagcaatagaagtaaaaagatataatcccttccccagagataaagccattgtgtatccttccagatctttttgatatgtttacacagcaggatatgaaaatagggctccttcaggcggggtgcagtggctaatgcctgtaattccagcactttgggaggccgaggagggcagatcacgaggtcaggagatcgagaccatcctggctaacatgttgaaaccccgtctctactaaaaaatacaaaaaattagccaggtgtggtgatggacacctgtaatcccagctacttgggaggctgaggcaggagaatggcgtgaacccaggagacggagcttgtagtgaactgagatcgcatcactgcactccagcctgggcaacagagcgagactcgtctaaaaaaaaaaatagggttccttctcttgactgaggacagtttggtagcatcagacagctccttgtcccatgatgtggtgaaggcagactggatctagtgacctccagcctgctacagaggtgcactttcaggtggagaggattaccttggagaatggtgcaaggagcccatttccctccctgtgccccgctccctgctgctgtgcctggaggctgagggcacctgggaagggcctttctgggccgaagatgctcctgcaaggggtgatgtcagggtataggctccccacacgggagccggccagggatttgtgagctggcggtggagaggccaggcccaggtatcagagaaaccaaaaaaatctgtggctgaggtccctcggagaggcagagcagggccacagagtgagtttagtaagagtgtgaggaagggtgcagtgggtttctgctttcaccgtaaggagtccagctgggtctatcactggctacatttacatatatataatatgcatattagggtttagggtttttttccaaaaataaaatcatactgtatatatgcatgttttcctcagatcatttttaaaaaaattttattttatttcttttttttttgagactgagcctcactctttcgcccaggctggagtgcagtggtgtgatcttggctcactgcaacctctgccttctgggttaaagcgattctcctgcctcagcctccggagtagctaggactacaggtgcctgccgccacacccggctaatttttgtatttttagtagagatggggtttcactatgttgactgtctggactcgaactctttacctcaagtgatccgcccacctcagtctcctaaagtgctgggattacaggtgtgagccactacgcctggcctgctcagatcttttttttttaatttacaatatattttatagatacttctatgtccataaatagatctacctcatttcttttagctaccctttagtagctaatcattctcttaccaaggaatatttatgatatgtataattttttaatacaaacctgactgctgggaatatatttattcatttatctacatttgcctctgtgaatatttctgtagaatagattcccagaggtggaattgcctggtcaaaggatgagtacttttaagattttgatagaaattgccaaatggctgtccaagaaaggtatatgatttttttactcctacaagcagtatgttggcatgcctatttctcatactctgccaattgagtagtgtctaccttcttaaatttccaggagtctgattgttacatttagttttcagtaggattgcccattttgaatttgctatcatgtgaattgtttttacatgtcctttgcctacttttcaattgaatttttaccatttttcatactgctttataggacctctttataaatcaaggatggatacagtcacgcagacaccctttattgtatatgttatatatacttcctcctagtctgactcatgccttccaactttattgaaagctttcacaatgtggaaaaggtttgaaataaataaaatagaaagtcacatacttttaggacaaaaaatgtaaagggcttatgatttgtatacagccttccaaattatgttcaacttgaccaaataagaaagaaaaaaaatatccaggatttacattgttataactgtcttagattgctattgtttcacttcctcctctctacttttaaaataattgacatataattagcatatccccaaacaaggttgtgaaccatcaatactatctaattccagaacactttcattacccgaaaaagaaaccatgtacccattacaggttgaccatcccaaatccaaaattctgaaacccaaaaagctccaaagtttggatttttttttttttttttttttttttttttgagacggagtctccctctgtcacccaagctggagtgcagtagcgtgatcttggctcactgcagcctctgcctccgacattcaagtgattctcctgcctcagcctcctgagtagctggaattacaggtgaccaccaccatgcctggctaatttttttatttttagtagagacggtttcatcatgttggccaggctggtattgaactactgacctcaagtgatccgcccaccttggccttccaaagtgctgggattacagatgtgagccactgcgtccagcccaaagtttggaatcttttatttatttatttatttatttatttttgagatggagtcttgctcttgtcacccaggctggaatgacacaatcttggctcgctgcaacctccatctcctgggttcaagcaattctcttgcctcagcctcccaagtagctgggattacaggtgcccaccaccatgcccagctagtttttgtatttttggtagagacggggtttcaccgtgttgacgaggctggtctcgaactactgacctcaggtggtccacccaccttggcctcccaatgtgctgggattacatgtgtgagccaccacgcccagcccccaaagtttcaaatgctttgggcatcgacatgtggctcaaatgaaatgctcattgcagcatttcagatttaggatttttggatttggaatgcttaactggtatatataatgtaaaatattcaaaaatctggaaaacccctaactctgaaacacttctgatcccaagcattttggataagggatacataatttgtactattctttaaacatttagtagaatttatctggtagaagccacctgagccttggcttttctttgcgggaagttttaaaagtcttaattcaatctcttcggttgttttggtccattcataatttttattccttctttagtcagttttggtagtttgtgtctttctagaaatttgaccatttaggttatctagcttgttggcatgccattgtttgtattattttcttatcatctttatttctgtaatgttggtagtgatgtcccctctttcattcttaatttccgtaatttgagccttctctcctttcttcttggtcagtctaactaaaggtttgttgatttcattggtcttttcaaagaactaacttttggttttgttagttttctttgtttttctactctcaattttattaatttcttctctaatctttattattgtttttctcctgtttgctttcagtttctcttgctctttttctgattcctcaaagtggaagtttaggtaattgatttgagacttttcttcttttttaacattgtcacttacagctataaatatccttgcaagcattgttttaactgcataccataaatattggtatgtggtggttttgtttttattaatatcaaagtattttctacttctcttatgatttcttctttgatccattggttatttaggagtgtgttgtttaatttcaatctatttgtgaatttctcaaatttcttttgttagtgatttctaacaattctgttgtggttggagaacataccttgcatgatttaaattttcaaaaatttgttgagacttattttatgacctgagagatggtctatcctggataatgttccatgtgcctttgagaagaatgtgaattctgctattactggatgagtattctatagatgtctgctaggtctagttggcgtagcatgcttttcaagtctcctatttccttattgatcttatgtttaatttttctatgaattattgaagtagggtattgaagattccaactattactgctgtcttccttcagttttgtcagctttgcttcatgtatttttggcctctgatattagatgcacatatgtgtgtggttatttaatcttgattcattggtacttttgtcattatacaatttcccactttgtctgtagtaatttttatcttaaacagacaatattttttctgttattagtatagccactccagctctgttttggttactgtttcctttctttctttctttctttctttctttctctctctttttctgtttctttctttctttttctctttctctctttcttttcctttctttctttccttccttccccttccttccttcttttcttccttccttccttctttccttccccttccttccttccttcttttcttttcttccccccccttttttttttgacagagtcttgctgtgttgccaggctagagtgcagtggcatgatctcggctctctgcaacctctgtctcccagattcaagcgattcccttgcctcagcctcccgagtagctgggactataggtgcataccaccatgcctggctaattttttgtattttagtagagatgaggtttcaccatattggccaggatggtctcaatctcctgacctcatgatccacctgccttggccacccaaagtgctgggattacaggcgtgagccactgcgcccggcttggttactgttttcatagtatatatttttttccattcttttactttcaacctatttgtgtctttgaatttaaatgtgtctgttgtatacagcatagatgtagatctttttaaaattttattctattaacctctgccttttaattggagtatttgagtgatttttacttaacataatttttaataaggtgggatttacatctgccattttgccctttggtttctgtacatttcatgtcttttttgtgtctctattcctccattgctcctttgatgttcaacagatattttctagtgtaccattttaattcccttgccatttcttctaccatttttttagttattttcttagtaattgccctgggggtttcagattgcatcttaattaataacaatctagtctggattaataccaacttaatttcaataatatacaaaaactttgctcttacatatgtctattccctcctcccttttctgtgctgttgttatacacattatgtctttatatgctcattaacacagatttatagctattactttccacagtcgtcttttaaattagaaggaaaaaattacaaacaaaagtatatttatactatgttttatttttacccatgtaattgccttaactagtactctttattctttcatttggatttggattactgttcaatgctcatttcatgtaagacaggtttgctagtgctaatttctctatggtttttgtttatcttggaatgtcttaattttcccttcttttaaaaattgaggtgaaattcatgtaacataaaattaatcatcttaaactgaatgatctagtgacagtgcatttacagtgttgtacaaccaccacatgtatctagttccaaaacattttcttcaccccaaaagaaaactctatactcgttaagcaatttctccccattccttttatttttgaagggtagttttgctggatatagtgttcttggtccacagtatttctctttcagcctggatagttcatctcagtgccttctggcatccataacttttcatgataaatcagttactaattttatcttatatgtgataagtcacttctctcttgcagctttccagattctctctttgtctttgggcttgactgtttgattatgatatgtctaggtgtcgatctctttgagtttatcctccttgaaggtcatcaagcttcttgaatgggtcgtgttttcctcaaattttggaagtgttcagttactagttctttgaatattctttctgcacctttctctttcctccgtttctgtggctctcagtgtacacgttgtatgctcagtggtatcctaccccaaggtctttgaggctctgttcatttttctttttctttttttctttgtcaccccggctggagtgcagtggcttgatcatggctcattgcagccttgacctccagggcccaagcaaatcctctgcctcagcctcctgagtagttgggactacaggtgcacacaacatgtttggccaatttttaatttttttttaaatagagataggaccttgctatgttgcccaagctggtcttgaactcctgaccagcaattctcctgcctcagcttcccaaactgctgggattataggcatgagccactgtgccaagccatttttcttcattgttatttttttcgatgccttaaattggctaatctcaattgacctgtcttcaagttcactgaatctttcttcttttagtttagatatgctattgagcccctctagtgatttttaaatttcagtaattgtactttgcaactccagaccttctattggttctctttaaaaatttttccttatgtgtattgtctatttgatgaggcatcattctcatactctcctttatatatgttttcttgattctttgaaaatatttaaaagaatttatttaagttctttgtctagcagatctgactgggctccctatatgtggaccatattttcttgtttcttcttatatcttgtaattttttgctgaaaattttaaaaatataatgtggcaacttagaatattagattctttctctctccctagggtttgttgttgttgttctttgtttattgacttttctgaactaattctgtaaggtttatatttttgtcatgtgtggccactgaagtctctgcctagttggcttagcaatcagctaatgatcagactgagattttcttaaacatttagaactagtaaacctcccaatatttgctgaaatctctgtgtgcatgttgggacactcctttcaacactcaaccaggcagttgatgactctgtctaaaccctctcttcctatttgtgcagaatctcaagatcagccttgagagcttagttagggccttctcaggccttccctgagtatatgcgcaggtgatattctagatacccagggatatgctgagcttccttgcaagctttttagacaatctgttgtttgccccaactgttattcacttcctcaggcagctgtgaagttaaatatttgccggtaattgtcttcagcaagcacctcagtgggagagaaaaggcttttcacactgggtgacttctgactcaggtcatagtgggttttccttcttgcaagtgaggtttttcagggaaccaccagccaggtcaattaatgacaaatctctgagaatgaagctttgaagaatcttcaacccagttgtccccttccagcagctgccaggctgctggtttatacagttattaggaagctgttggttgtcaaggctgccatggaactagagagcagggtagtgaaatatggcaagctaaaatgctgtagagctcactaattttaccgagatttggctgtttatctcaaataaatgttccctgaattattgcattaatttccagagttctgacaaagttcattctgacctttttttttttaaccagttttctcattattttcatgggggagagagtttttggagatccttattctgtcatttttgctgatgtcacttgcttttggttttattatttaaagtgttttgaatcacattgaatgtttgatatcatcatatttgattaaccaagagagatcagttttgtcactcattcactttgtgtcctgaggcaagttgcagaacctgtcaatctcagttccattgcttgaaaaatggttggttggttgccaagtgagagctccagtttttaccacctctgagattctgagcctctgaaggccatattttcatctgcattttctattatccccttgtgcagttttattgagcttatttttttaagttcataccacaccctgtcagtcatattttcatgacagttatttcattctgaatggtaaacattagcatccaacagcatcattatggcttttggctgttatttatttctgctgagaaactttaaaaatgcagttgctatgtattttaccaccataacaaaactggaaaaaaaatgcagtagcttttcccaccaacatcctcccccttggtttagcagctcctcggcataagttaaaagagagacctttaaatcagcctagtacagggtactgatatgaagtcaggagttccgatcccatattatccaagccttacgtctcacgcacccttcatagttgctgaggaattggccccagcagcagatttcagtcactgtctagactggatcatctctatgaaccacagcccctgtatttgagcttcgacttcttctgatggtcccatggtacagatgcctaattgccatagatacacacccttccacactcctacacctttctatgccctgcaccctcttgctaccttccttttgagctgaagctgactcagtggtcacttgttccaaggtttgaagaagcaggcacaggatctgactgcactctctggaaggcccaagtccatcctcctgtttttcaggtgcctgcaggtggggataggtctcagtcctgtcaggctgctctaacagaataccatgaactgggcggctcacaaacaacagcagtgcctttctcacagttctgggagccaaaaagttcaagatgaaggcgttggcaggttggtgtctggcaagagtccccttcctggttcatggacagctgtcttctctctgtgttctcacatagcaggagtgagggaacactctggggtcccttttatagggcacagatcccatttgtgagggctccaccctcattacctaatcacctgccaaaggtcccacctcctaataccattgcactggggattaggtttcaacacgtgaattttaggcaggggacctaacaattttgtgtatataggatcatccatgcaatcctctgtccactggagttgggtcaggtggcagtgatgggcagggatgtcctgctgcctggctctgtcactgtggaagagggtggggttcaggtccagccccaccaccttactctattttacctgcttccagccctgcatgtttcttctctgaagacctgtgcagagagtgtgataggtacttggcaatatctggctattgccctccctgtccttctgtgttgagccctttctcctgactgtgtgagctgtgcaggcccctgagttatttggccagtgtaggagattgctgctgatccaggctccctcttggactcagtgctgctggtctgtggcaggcaggggcaggtgtttgcctttgcttccaggcctccttagcaccaggctctgccgtgccgcccccctcatgccctctactggcccgtatctccaggtgggtggggcacctgtgggtctgctgccccgctcctgccccatccccccaacacacgccgcttcccagccaccgatcagctcctgtgggcggcactatttctgaatcccagtgagttaggacgggacagccagagcaggtctgtctggaggtggtgtgggtgggtgcccatgtgctgcattttgagagatgccaaaaataacagtgagcaataatccctgccattagcttcatccctcctttgtacattacatcatctcattcggtcctaaacaacagcctggatgacaggccttgttttccccttttgataggtgagaaacttactaggcccaggctgttaagcaacaccagggctccagtaaagacagaacttggagttacttctgttctacccgggctcgggtttattctctggatggtagaaatttgtcatctctggttcgttgcactggctgtgttagctttatacaaacacgctcttcccaacgggccagggaaccagtgggagcaatatgctgctgccccttgccgagcacctgatacgtacatgactccaggctgagctttccaggtgcaggtctcaggccagcagtgcaggcgcctgagaactttcagccttgtttatgctttgagcccctagggctgactgcctgccatcttaatcccacccagcctggtgtttcttccagcctccagcacccaagttctgggaggtggattgtggtgcctaggcatgtggatgggagaaacaccactgttcctccatgccaacaagacctccatcctcccagctctgtgccagtcaccctgggttggcatggagccttctgtcttgtggtctcttttgtttttggtgacctgccctgccctagggcaccccgcccctgctcccaatgggcacagaatactgtatgagacatccaaaggcttcctttcccaaacaccacttgcagctctttctatccaaggaccttgctgccactacctgggtctgcctatgtctgtctcactctaagacgcttcatcctttgctaggttctttcccacctggcaggagaagtgtggccatcagatcacactgggcacgtgcaggggatgggccaaagcttgaggtttgcttattctgctggttactgagctgttgaaaagtcaccctgatacaaaggggtcatccctctaccctgtgaatccacaacaaacagatgctgcttctactgatacctgccttagagattgcctcagcctgtcctggctgtcactgaaagtcctgaaagtatcccaagcccctttgttctacagatctaaaaatggaaccaaacaaagcattccgtgtggaatcggggggttcaaatggtttgacatcactcagccagcccctgtttgctcagggaatgagttgggactctttctgttgcagatgaggcttgtttggctttaaaaaaaccagagagacaggttttatggctcatctggaaaatcacagctagctagcttcaggaatagctggatccaggactcccaacagagtccccagaggcatttgcttttcctctcttcattgtgcggtgcttccttccttcatagactctcattttcccaggcccagcagaaaagaaatattctcttgcaacaattctgaaaatccatgagcttcactctcctgggcctgaaaccagtcacatacctgtccctgaaacagccactcttgccaggggatagaactacattgactggcttaggcctgggccatgtctgcagtttctgtcttgggccatactatgtattaagagtctggctaactgaattcctgggtgatcacaatttctagccctgctggaggagtggtcccctctgttcagtagtgccctgagtagagctgctgcctcaccactggtttcaagtgaaatgcagcctaagtggcctttagtcgcccggctgagttcccatttctaggaggctgcagtccctccattctcctttatttggccttcagtgactcaaaggaaaaccttttgttctggagactgtcgtatgggacgtggaaccaggtgcccccacacagcaaccatgttgtgttttagtcccatcaactctactgttcccaggtcctcccccaggattagaaagcatcatgccccttcccagggaactccagttgtccaggccttctgagtgcagcctaaacaattagaggctgggtcttcctgggctgccttaagcctgtgttggaagaggcacctctcagaagtggactggatcaacttcagagactccctcctctccccgccatgatgctgtgtgcccagcttccacaccaggtcacagacccggaaaacactcgttggccatgagtggcttccatcgcctggatggtgcagaaaccaagcttgtggcagctccttgtccttgtgggtgagccccatttgcatatacatggcgccccagctgaaggctcccctgatgacacgagggtcacactcaaaggtgttgatacacctctagaaccgtggttctctactctgcctgcattccaaaatcaccagggtggggcttcaaaaattacacacccttgccccactgccagcagctgggctgaggcataacctgagtgtcaggatttgtcagagctcccaggcaattctgatgtgcagctggggttgagaacaagagctgtaaggcagtgcttctcaagcttgaatgtgcagaggaaccacctggggaccttggtgaagtgcagattcagattccccagtctgcggggagcctgagtgtctgcatctccgacctgctcccaggtggggctgaggccgctgggccccaggctgcacttgaggggcaggggcaccagcgttccctccgtgaggcttctgaacatgccctggcaggtgagcacatcagcctgtgaccatgctcaccatcacagacttggtcctacagggctgcctccaggtagaaaccaaagccacagcctccccagacacagaagtgtccatctggtttcaagcaggtgccgagtgcggcccatctgacgtgtcggctctgaagccactaggagccctgcagtggcgctgatagccatcctgagagtggaaggggtgaggcctctccagggggttttagctcacagcccctcaagctattaaaaagggcattctgcaagttctccttcagccacagcagccgaggggccaagtgagtaggggaggcaaggcttcccccttgcggggaggtggatgtgtcacacttgtccaaatgaccatctgtcacagtggccagaaagccccccggctgggggctctcccgacacctgccttccctcgggacccattggggcaagtctgggttgagtttggctccagtgccttgcccttggagcaactagatgcaggtgtgggaggagaccttgtcagctcctctcctggctttgtggccacctgacctcgcggccagagaactggaaatcctcttactaacccaggggcagacaccctgcaaacacccgctcagaaacacactccatcctatcgtctgtaggactcaggatgcccagagaagggggggcccacctgcccgccgtgcccatactgatgcagcgatgtcactcactgccacctgatgatgctaccttttagtcacaactccgagttgcctggcttggtgctcataatattctattcagctactgcttaaggagtaagcatatatcagctacttagaacagcgcctagcacagggtaagctgccatcatcatcatgccttggcttcctggaacagtaaagttggagaattctccaatgtccttgttcgttcacaggatcttgtctgatcagcacagcccgtcctcctctggtcactcttccgtgcatcagtcaactaaggaacgcaggcaaatgctcccttagtgactacagtaccatgcccagtgctgcgtccaacataacctgtaccaataggaggattacacagtgtacgcgttgcactgtattaataactctgcatttatttaacacctaccaagtactcagcactgtgggatatgcagaacttatcaagtttattggtaccgtgcacacgcactttacagtctaactgaggaggccagttatgacccatgaggcaacgcagaagtcattatgtgctaaatggtgtgggccacctgtatactgtgtccacccccatggaaatattgaagaaaattgaggcttcgctgcttttttaaagatctttgaaatacagaggctgaggctgggcacagtggctcacgcctgtagtcctagcactttgggaggccagggcgggcggattgcctgggctcaggagttcgagaccagcctgagcaacacggcgaaaccctgtgtttactaaaatgtaaaatattagctgggcacggcagtgtgcacctgggacagctactcgggaggctgaggcaggagaattgcttgaacccaggagggaaaggttgcagtgagccgagattgcgccactgcactccagcctaggcaacagagtgagacgccatctctgagaaacataataataaataaaatacagaggctagaatgatttggaatattaggtgtctcatataatgagccaaatgcatttccatattgttctgtgtcctcactctctaaatgcatgtctcagaattacaaactaggaagatattgatgtcgaaccaggccaaccccacatccacatcacacagagaatcctatgaaacagttcaaaaaaaatcaactatttgacatttgtttttcttagagattcagaagaaatgaacacagtgaaagaccttaataaaagcgagtgcaggtttggtatctgaggcattctttccttaggttttctaagcataggtggtgaggctcactcattcataaaacatttatcaagcctcactgtgcatatgtattagggctaccaagatgaaaagaactggtttctgccctcagggagctcagagtccaggagggagatgtgtgaaaccaggtgtgagtgggcaggggctcggaggaagggagcaggttgccagggcagcgggaagatttctcagggccagggtggtggtaatggctggaggtgaggtgcactgggccaggccagagggactttctgtggtcatagcattcatttttctggatcacacacaagctgtatattgagaaccagattttgaaaatatatcttcaatacagatggtccctaccgtacagtggttcaatttaggatttttcaacttcacgatggtatgaaagccatacgcattcaatggaaactgtacttctctcgtgatgctgggcgcctctcaggcagccatgcgtttgccactacaatatttttagcttacgatgggtttatccggacataaccccatagtacgtcgaggagcatctgtacctgttggtctcagctcctgtacctgtttcatatgttggttaactaaaacatcttcacgtaaaactgagtttgtgccaattttacagacttttatttttcaaaagtaaaatacagtcatggatcacttaatagcaggaacatgttctgagaaatgcatccttaggtgatttcatcgtgtgaacatcatgtaatatgcttacgcaaacctagatggtatagcctactatgcagtgaggctacatgtggcctgtttcttctagacgacaaacctgaacagcatgttactatactgaacactgtaggcaattgtaatacaatagtaagtttgtgtgtatctgaacatgtctaaacatagaaaagggatagtaaaaagggacagtatctgaacatatctaaacatagaaaagggacagtaaaaagatggtataaaagattaaaaatgggccgggtgcggtggctcatgcctgtaatcctagcactttggaaggccaaggcaggtggatcacccaaggtcaggagtttgagaccatcctggccaacatggtgaaaccccatctctactaaaaatacaaatattagctgggtatggtggcgcacgcctgtactcccagctacttcggaggctgaggcaggagaatcgcttgaacctggggggcagaggttgcagtgagccaagatcgtgccacttcactccagcctgggcaaaagagtgaaactccatctcaaaaaaaaaaaaaaaagattaaaaatggtacaacattatagttccttactatgaatggagcttgcaggactggaggagttgctctgggtgactgagtgagtgagtagtgagtgaatatgaaagcctaggatatgactgtacactactgtagactttataaacactatgaaccgaggatatactaaatttatttattttaaatttttttattatttttgagacagagtcccactgtgtttcccaggctggagtgcagtggcgcgacctcagctcactgcaacctcctcctcccaggttcaagcaattctcctgtctcagcctcccgagttgctgggactataggcacccgccaccatacccggctaatttttttgtatttttagtagtaacggggttttcaccatattggtcaggctggtctcaaactcctgacctcaggtaatccgcctgcctcggcctcccaaagtgctgggattacaggcatgagccaccaactaaatttatttttaaaactaattgcactatgatgttacaatgtctctaacatcactaggtgataggaatttcccagctccgttataatcttctaggatcactgtcatgtatgcttttcatcattgactgaaacaccgttacgtggtgcatgaccataatagaatgttagatatcggagcccaaaccacttggatcacagttgaggcccagagagggaaatgactgatcacaagtcactcagctgcttaggagcttgttagtggtaaagtcgagggtagaacccagttctacagacttattgctatttctaccaatagaggcagcaagcgtctagccaagtgctgccctgagccactggcaacagctgcctggagtatacactgtgctgtgagcaacctgagaatgacactgtgattgattactgatttctgccaagggcaggtaatgggagcgtggcaatggatgtgccggtgttgcatttttgctttatctttccttgtggtgatgaaaagaatgtatctctaaaagtggaagctgtggttactaatcccattagacagtagacttacaatgcatttatttaagtctgtgaccatttactggggcctaacacatgctgtcggtgctgggaagacaaagctgaatttcacctagcctggtccttcacaggctcacagtcttagggcaaaagccttgttcagtagggaaacttcctgagatttcaacaacttgtacacaatgagaaaatgtgaaaataatttaatagtggatttaaactctctagagcagcagtccccaatctttttggcaccagagatcagtttcatggaagacaattattccatggaccagggaagggcagggggatggctttggaataaagttgttccacctcacaccatcagggattagccagattctcataaggagtgtgcaacccagatccctcacatggcgcagttcacaatagggctcgcactcctatgagaatctaatgccgctgctgacctgacaggaggtggagttcagagggtaatgtttgctcgcccgctacttacctcctgccgtgtggcctgcttcctaacaggccacggtctggtaccagtccacggcccaaggggttggggacccccactctagagcattcatgctgcttgtctaaactctttttaacttaaaataaaaactaaattaataccttttcagttactaaactttcaaggtgattttagatctgtaaaggaatctaaatattacctatatttttactctcgatttaagaaaataaaggcaaacaaattcagacatactatttgttctcaataattgtataatttcctcatatctacatctccaactctaaacctgaatgttctcccaggtcagggagatcactggagcacactggcttttgctctcaagtgtaagaaaccagtttgcaagcttgtggcttaacctggggtccggctgactgatggaaaacctgagagctgaccaagaggaaagcaagcaggccggcaggccatgtgatgtgcctacagacaatgttctgcagccccaccggggcaaatcgttggcatctgtggcctctatgtcatcagagttccaaagtgccagcctaccaggggcaaatgtgtaatctcattagctgacaggttcctatcatgtttatttttgtttaataaatgcagatactagctctgtatggaacatgtatttctgtccttcgtgctgaagcctattttcttagtctcttgtaatgggttatttcccagtaattcatgatgcccctgtgttgaatcatttatgtctgcatgtcttacgtgtcaggccacaaggatcctgagtgcggttcttctgcccagaccaccagctgatagaatgtcgggtgacagcccactgtcccaggcttgctctgttctctcttgctgtctgtcaactgggactttccttcttccctctgtcagagattgcagtggcctgtctcatcacacccatacagagcgactgacagatgtgacagatgtcggtgaggagcacagtgtctgagatgacacagctgggagttgctaatttgctgagctgactagcggtggcctgtcttgtgtgaagaagcacagggaagtggcagttaggaggccaggcatctggttgtgcctttcccactaggtgactgtgaaaacctgagccagcagccaaatctttctctgagctgcgtcttcatgtgctgagtgaagggcccgaccacactctcttctgtgactcgtggtgtacatgggcggggggccgtgcctgcccctgacagtgaggtgcttaacttaggcggttgtacagagtgacggcactttgggaggtgatgtttgcaaggcattcctgcgaatgtggtttgatctcataagatgcttattatgcagactgtgtttgttctgcacgcagtacatgggctccaggtgggagggaagtgaagaacaaattgtgtagcaggccttgtcgggggcattgctacagtggggttgttttggggaggacatcttgctttccttggagatggccagaggaacagaatcggggtgagcctaggttgccttcatgagccgagggtctgtgtttgtgacacccttggaaacagcatgaagtgatcagtaacgaggatgggactttctttgtagaaacaccagcatttgtcccctgtgccttgggctacctctaatggtggggtggtggggtgacagatgatgacaatactgggctggcccaagaccagaacagaaggaaccactggttctgtcaccattccttgcccaaaaaccttccagagattctgcagtcccttgttgttccacagtgtggatttttggaggccgtggaggaggtcaccacacaggtcccatctttaagaacaagttctccaatgactattctttgcctcctggacactgggaggggtgcatccaggcatgcggagggagactggccccacgaggcgcaaggtgcaatgattctgcccagcagcccgtgcggagcctcctgactcccggctagggcatagccctcaggtttcactctggtgttcccacagagccatgtccacctggaaggaactgtgagaaaccatcaggggggcaacatgagctgcagctgcggtttcctgtttcgattttgatcagggatcaatgtaatctatgatggctgttgggttctatatagcatcactttggggtattaagcgagaaaagaacgtatctgtggcaggtaccacttataaaagttcaccctgaacaacacacagcaaagggaagattctgaagttacctaactcgtttctgatcattgttaacaatagatctaagtaatttaagtgctcaattgggctttggggctataattggttgactgcctttgcagctgaaaagaacttaccagtagcaaacttgtcttgcggaattatttcttttttttatttttgagacagagtctcactcagtcacccaggctggagtgcagtggcacaatctcagctcactgcaacctctgcctcctgggttcaagcaattgttgtacctcagccacctgagtagctgggattacaggcatgtgccaccacgcccaactaatttttgtatttttagtagagatggggtttctccatgttggccaggctggtctggaattcctgacctcaggtgatctgcctcccttggcttcccaaagtgctgggattccaggcatgagccaccacgcccagccaattgtggagttatttcaacagactagatgttcaaaatattccgtgaggaaaagcacgttgtaatgtttgtaaatccccatgagtgggtgagggttcctcttagaggggcggtgggctaagtggcacatcatgtgggggatcctctcgcctatttcctggcaggcccagagggactccagttctgtatccctgtcccaggccagttcagcagtggatctgttcccaccctggggtcagagctcagccactgtggtccctgtgtgtgggttgtgcattgctacattagaggtagtggagcccagaagggaagctgtgttctggggacagaggttctaggcacccgtgctgacttgccttgtggccttgggcagcttggttgctctcaagttctacagcgatagcttctcttcctgcctctgtcacagagatgatgtggagacaaacaagggagccggtgcaaaagtactttgtgaaaaagacagaaattgcccctcatagacatgagatcttgttcccagcagtggagaaggtaggtcctgacatcgagggttccttctgtgtgctaggcactgcatagaaacttacacgtaggatctgcttcaattctcacaaccgctgaggtatgaggtttccaagttaggaaactgagcctcagagagggaagtaacttaactccaaatcctcggccccaaatcccagtctatttacatcacactgccttgtctttaaaagaaactattggagcttcttctaattatgaacaaaatgcatgcgaagtcagaaaacttaggaagcgtgaaaaagcacgagacagtttaaaatgaacatcattccatgacccacagataacgtcagttcacatcattttgtgatccttcctttatttattctgtgcactaagagctttacgaaaataaaaacgggttcttactgcatacatcattttgtacacgtcatactcatcaaaggaaggtccacgggcagcatcgtcagcatcacctgggagcttgttagaaatgcaagcatctcgggctgcagcccaggcttactgaagcaaaatcctgatgagcaagctcttcaaatgacggggatacattctcacttttattttatttagttttaatttttttactctgggggtacaagcgcaggttttttgcatggatatattttataatataatggcgaggtttgggcttctagtgttcccatcacccaaatagtccacattgtacccaataaataattttccaccctcccccttttgaagtccccattgtctattgtttccatctttatctccatgtgtactccttgtttagctcccacttataagtgagaacatgtggtcttttcttttcttttgagacagagtctcactctgtcacccagactggagtgcagtggtgcgatctcagctcactgcaacctcctcctccagggttcaagcaattctcttgcctcagcctccctagtagctgggattacaggcatgtgccaccacgcccggctaatttttgtatttttagtggagacggtgttggccaggctggtcttgaactcctgatctcaagtaatccacccacctcggcctcccaaagtgctgggattacaggcatgagccaccacgtccagcctggtattggattttctgattctgagttgtttcacttaggataatgcccccagctccatctgtgttgctggaaaggacatgatttcattcttttttatggcggtgtaatattccgtggtgtacatgcaccacattttctttatccagtcatttgttgatggacactcaggttgattccctgactttgctattgcatactcttagcagtctgtcatagctgattttccccccattgcaatgtatggtgggtattgtcccacgtcactgaatattttcctgtatcatgatttctagtgactggataacatccctcatatgactgtgtcctgctgctgtgtctggtctgcctatgtctcctactggtgagccttcaggatgtttccaggacactgttataagaatgctgggttatctccttaggacaaattccccagaagtgaaattactagagcagcaggttttgatacatgctgccagattccagcccagaaaggatgtagcttgcttggtcactcagacccttgccagggtttcttgggaggcagctgccatcatggggaagagctcacacttgcggaggcacaggccttgatttcagggtcggacattccactgactgcctcagtcatctcggactggttgcttagctgctcaggccctctatttcctcacctgcaaaaaaagcaatggaccatttaactcatagctggttgtgagccttaaatgaggcctgagatgtgcttaataaatgttcatttccttccctctgaatgaaaatgagcccagggcctaaggaggtcctatcacaaagtccttagatgtccttgcataagatattttctgttgcagtttataaattctattctaatagatgcacatgggtgtcactgaccttttcgtttggttctctgatgtctcagggaacgtatggcttgggcacagcaaagaagggcaaagaaagaaaactgaaattttctgctcctgaaatttgagcagagaggtaacatgtgtgcaccgtgctgtggagagcatgctgggaggcggtggaggggcagtgagaggtgtcaaggcctgcaggtgtcttgctacccctgctcttcgcgaatctcgcggtccctgggcattcacacgatgtgacagcgcctcccttcggggactttgtctcagtgtggagtgatgtcttgttcgggcattgggccactctgtgctgggcatgacctgtatgctgggcttccacggggacagagtgctgaagaggctcctgagggggccctactactgacagagggcaggtcacatgcccagagcaggcgaaagcaagcagcagaggcaagctgcatgctcaacccggcccaccgaatggggtggaattgccactgtgggccttgtgggatttggccagctcgtgttgctgggcagagtgctgctggctgggacagtccttagagacctcagccctggggcccagtccctgtcccttcaataatccattctgctgcaggggcccctgcaccacctcccaggatacaggggactctccaccagctaattggccctctccctgggagaaggccaagtcgttggcaggagcacagtgggctgcagactctaattgcacaaagggcaaatgtatataaactaccttcagcgcactgcgtgattatcatctgagctctcctctgaactcactgctttcttctgtcatcatcaaatgtattcgttgtgctttaaaattaaattgtaggccatttgagtagaattctatatacagttgccatttggaaaacagaaaagcaaactagggctttttcagaaccatcttcagaagttgcccttgctgctgcctgttcctgagttttactaacatagaatcgcacctgccacccagagccctctgtcaacactccagatattgcctggaaactgctgactgtaccggttgcagttggcaagccatcagacttgggaggaacttgagtcaggtggcattgtgatgccagttgcaggagtctattattttgaagtggcagctgcaggtaatcagataggagccaccagggcaagtggctgtgtcacgtggggtggctggggagccggctgggcaggctcagtgggtgatttttgggagggtgtggcccctgcacctgtcaggtttgggctccagggggagggctggaaatcccatcagtgcaacaatgagtggggcaagcaggtccctggtaaaggagcattgggaaggccccaggaaagcagttaacaaagcatatcaaggacctgaggtaacacgatgggcctttaaggaaaagtaaaaagaaaactgaaactggggagcaagtgtgcagcgcagagacgagcgtgcctcccacagggtccctcgcactgagatagcaagtggacatcaaggcgaggcaggaggggccgggtggttttggtgctggaatgagagaggagagccctgggcctgggtgtgtctggctcagaagctgtttccgattttctcagcattcctctttcttcctgggccctgcccttcctcagatggggaatgcagcctcacctgccattgccctttgcctgcttccatggtgagcacagtcaacaaagcccaagcaactcagtggggatgccaatcacagggaggcgagtccaactccctacagagccaggccacccccatcccggccttcagggcttggagtggaaggcggaagtgcattgcgtttcttagacggccttttctgctgtgtgcctgtgcacccgcccaaggagctcacggggcacaggagggctgggcttggcagaagccccacttcctcctggcgcacgggtacttctgtgagagatggggacaagggctcttgatcagcaaccagtggtgacccgtgggccctaggccactcagaggaaagggaggcccactcttctccctgctgctagcttccaggaggatgagagagctggaggctcacagcacactcaggaggatggctgccttttaccagtgcatcaggcctgaccccaggtgggccctctgagagcaaagaggtggtgggggagagtcgcgagggaggggaggccaggccgtgactcccggggcgtgggtggccaccatcccctgaggcctatggataaatctgcagcgtctgttaccttatgttctagaatgtttgtgacctccttacttaacagactttttatctccttgagttgtgtaaattctggagcaaaataaggattttctttgtttcctttatgacacacacgcatattcataaagagaaagggagagggaaaggggaggagggctgggtgagcagagtgtgccattcttaccataccgtgtttacacttgggatctccatggcatagttgatatgctttgagtgaagggaaggcagcagaggtcaaagtttaaggatgttgtaattatgccactacctaaagctcagcaccaaaggacttgtgttcaactgatagccacagccttgggagacgctctgcctgagctcctgcacagccaaagccaggggccctacacagagacatcttgtcctgctgtaggtgaccttatccctggaaggtgtttggctctcagtgcattttgactctgtgcaccgtggtgcagagggaaatagagctatggcttgattaaaattcatttgcttagcataaataaacagatttgtgtttctcataccccacatggaaaattcccagtagggcagtctctgtcagtacaggtgatggttatatccgcacatcacttgagctgggcgaacggtcttgggaaattgttgttgcttctttggaaagacccacccactgcctggcagcagggcttggagggtgctctgggagttggggcagacagtccatcctcaaagcctcactttcgtttgttacaaaggagtagtaacccaacaactcaaggattccttgtgaagacagggccttgtactgggtaaaaccctgtgcatataagtcatcatcattgttactgtttcataaaactctttttactaagaatgaaacctcagtgcctgattctgcccattttatatgggccaggatagagtggtgatgttatgtcttggtaataggcttcggagcattatttcctactgaaaaaacaaaacaaaaacaaaaacaaattcagctccacatctgctgtgctgcagaaatgtcagtcataaatgtagggttctagataaatgaagcagtattttggggatatatgcatagaaaaatggagtatattacctcaataaactcatgaagttaaaaataagccagcccttgcaaaactgtgcccagggcttcggtgtcctgttcgtcacatatgtgtgcagcagtcagcacgagtcatagctctcactcagagactgaacgttgccaagttagatggcctctttgcaagacactcctcagcgttagagtgaatttatattgtatcttcccaagaattatgcaaatagaatttctaaaataaggctatgaagtctgatgcttagctctttttgaaataatggttttgtaaaagtctctgatagttttttttttagtctaatgacctgaaaatgtctaaactaatgtttttcaaatctcatatgaaaacattcacctcaatgaatgtgtaaacaggtcgctgttatgaaagctgtcatgctttgcagtctaagacatgaattgtattcaggggtgttcgtgcaggcttaggtggcccatgtgaacataggctcatgtgtgcatatatagagtatacactgtgttggatagctgtatgcatgcctagctaagttagttaatttgtccatttatagggactctgaataccactaaatcaactgttatgtaggtagtttctaaaaaatagtgtagtttatataagatactatttatatgcttataaactatgctgtttatctcatggctgactgagtgttggaatgaagctatggtattttcttgcaaagaagcagcccagcaagttgtggcctgccattctctctagatgccctcactgtccctgccctgcccacggctgaggggaagcctggggaagtaaaccaggcctctaagcaggggcctcctctgcttctatattcctttactcccaaaccgaggggtctgcaaagcccagcagacttcagctctgtgtggctatagggtagatgatgtttataggaagacactaggcaagaagaactcaggctaaagaaatgtgacattgtctagctgagtcatagattttgaaagaagtctgtccttgaggcattaatgtgttgggtgatcattaagaagtgattctgctggtcacggtggctcacacctgtaatcccagcactttgggaggctgaggcgggggatcacctgaggtcaggagttcgagaccagcctggccaacatggtgaaaccctgtctctaattaaaaaaaaaatacaaaaaattagcctgcgtggtggtgcgtgcctgtaatcccggctactcaggaggctgaggcaggagaatcacttgaacccaggaggaggaggttgcagtgagccaagatcatgccattgtactccagcctgggcatcaagagtgaaactctgtctcaaaaaaaaaaaaaaaaaaaaaaaaaaaaagaagaagtgattgtttcatctatcaggtgttactgctaagtgcctctggatcatttgctcattcattcattcattcatttaacaatatttattgagcactaccatgcagctgttctatgctggtgacatgttatctctcctcatggagttagtcttccagttttacctacttagcaagaaaggggctttctctaggccacgccttactttagtttttaaacatcagacaaacagtaactacagggcaataagatacttcaaatctgaccagccaagttcctttactcgcccttcttgctttacttagagctctgtcatttagcatctgaatattctctagtttcagccctttgattatgagatttctttgctttcttttctcttatatgtcagagcagatctgtctctctgtcctcgctatcctttctgacaagaggacagagaaggttttgcacacaagtggatgacagcttcagagagcaggaggtgggaggcagaggtgagtggatcacctgaggtcggtggtgggcacctgtaatcccagctgcccaggaggctgaggcaggagaatcacttgaacccaggagacagaggttgtagtgagctgaggttgcgccactgcactctaggctgggcaacaagagcgaaactccgtctcaaaaaaaaaaaaaaaaaaagcagaaagtcctcttgacaccttcagggagaaagggttggctgcagtgaggtccggtcttgacgcctctttggtgtgggtacagctgtcaagtccctctgcttttgaggataataatatcattaagcagcaagctggcacaatttttgaacagagatttctcacaggaactctgcaagcatttcacattccatttgcttcagtaatgtgaaacttatttttctaaaaaaaggtacaggcagatcttggcatgactcactagagaacaatagttaagtcataatttattttcatctttttccccaggaaagggaaaaattgattaaaagtatggggaatgtaaccaggcgtgaatctgtaaaggggaaatggatcaaagaatcacacaaacatgtatacatgtaaaatgggtaagttttgtgaacaaaaggcacagggtctcccatagtatgtcgcgggaggtcttgacacatcctgaagggacagattggtcttcctgcggaagtggaatgaaagctgaaatctgaaggatgagtaggagtaagaccaaagtggaatgtgcagggaacatcaagttcaagcagaaggaacaacatctgcaaaggctccaagctggaaggaaacggagtgctattggtggagggagagcagggctgaggcacgcattctgctggtgtgcacagggcttgggttggagtccagcccaccacctcctcttgttgacgtttgtgtctgtccacgtttgtgttttcccctattcctgcctgcacctccagtcttctccatgagattgcatccctcttcctgtaacagttgtttcagtgtgagtttgctggaaacaaattgtatcaacttttcttttctgaaaatgtctttatttcatcctttttccgcagctttgatgacatattatttacatatcataaagttcacctgtttaaaatgtataatcaggccaggcgcagtggttcatgcctgtaatcccagcactttgggaggccaaggcctgtggatcacctgaggtcaggagttcaaaaccagcttggccagcatggtgaaaccccgtctctactaaaaatgcaaaaattagccaggcatggtggtggctgcctgtagtcccagctactccagaggctagggcaggagaattgcttgaacctaggaggcggaggttgcagtgagccgagatcgtgccgctgcactcaaacctgggtgatggaacgagactccgtctcaaaaaaaaaaaaaaaagggtacaatcaatgggtttttgttaaagagttgtgcaccaaggaacacaatctaattttagaacatttccatttccccagaaagaaaccttgtgcccattagcagtcactcccattctacctgtgtttccccagcatccctctccccacctctttgcaaccactaatctactctgtgtctctgtggatttgcctagtctggacatttcgtgtaagtggaatcatgcagtatgtggccttttgtagctgccttctttcacttaggttaatgtgttcaagattcatccagattgtagcatatatcattactttattcctttttcttgatggataatatttcattacatatatgtaacatgttttttattctatctatccagagatggatatttgggttatttctactttttgattattatataaataatgctgctatgaacattggtgtacaggtttttttgtgcacgttttagttgtggtaaaatgcacataacataaaacttaccatcttaatcattttaagtggtattaagtgcgttcagattgttgtgcagtcatcatcactgtccacccccagaactctttttggggtcttgcaaaatggaaacactacgcattaaaaagtaacttcctaatcccttctccctcagcccctggcagtcaccattttactttctgatgctacgattttgactactctgagtacctcatataggtggaatctagttttgagactaataattccaggtgcttcttgacttacgatggggttatgtcctgatatacccatcataaattgaaaatgtcattaagttgaaaatgcacagctgactggagacttggtgccactgcccagcattgcaagagacggatggtttctattgactgggtattacttttgcaccattgtaaagtcaaaaatcataaattgaaccatcataagttggttttaaaagcctgtacctctttttttaaaaaagtgctagtctcttaaatcacgtaaaatacaaaacaatggagttacaaaccatttttacaataagagtagctttaataattcccgtgtatttacttttattgagatctttatttctttatatgccttcaagttaatatctagtgtcctttcatttcaacctgcaggactctttttagcatttcttgcagaacagctctagtagtaacagactccctcagcttttatttatttgggaatgtcttaatttctccctcacttttcaaggatacttttgccagttataggactcatgcttgacatttttttcttttcacactttgaacatatcagcctactaccttctggcttccaaagtttctgatgaaaaatctactgataatcttattgcagatctgttgtatgtcacaagtcacatctctcttgctgctttcaagattttctgtctttggctttcaacagtttgattataatgtgtcttgttgtgggcttaagttcatcctacttggatttcattgagctaaatggatgttttatacatacacacacataaacatatgtgtgtgtatgtataaacacataaatgaataaatgtataaatgtaaaatgtatatatagatatatgtatgtataaacatataaatgtagaaatatataatgtatatttcatcaaatttggaaagtttgcagccattattttctcaaatattcttcctcccatttctctctctcttctctttctggaactcttacaatgtgtatgttggtccacttcatggtgtctcacagatcccctattttctgttcacttttcttcaaatctttttttctgttccttagacttgataatttccattgttatatcttcaagtttgcagattcttcttctgcctgctcatatctgcctttgaattcctctagtgaatttttcatttcagttattgttcttttcacctcccagatttctttttggtttcaagattttaaaatctcttcagtgatatttcaattttgtttggacatcattttcttgattttctccacatctccctttagtttggtgaacatttttaagatagctgttttaaagtctttgtctagtagatccatcatcaggtgtctttcggagatcatttctgttggtttttttcctttgatggtccatactttcctgttcctttgtatgccttgtgattttttgttgtggaaaactggatatttgagtctaatagtatggtaactctggaaattagcttctgtccttttcccagggtttgctggtttggatttttgggttttgtttgtttgttttaattgttgcaggcagtcttagtgctgatgatcagcctgaagtataaacttaaggccttcccagatctttcctgagactgagcctttttgcaggcatgcatggtgactttctaatctccccttatgtagttgcttttgagtgacctagtctttgatatctggctccgagaatgagaaacaagaaaagtgaaggaagaaaaagggtaccagcccattaaatctgcagggagtcacctggggctggagggagtcttgtaacaatggggagaggtgcaacaacaatggctgccacctctttgtctgcacctctgttatcagaagcaacagccagaggacagatccctagtgtttggaggacagggtcccttttgcttacactggcttctgcaagctgcatacaagctgctcctggaacacatgcatggagaagtggggggatgggtggatgctactgtgctaagagcagaaatgggcagaaattaaccacaatgtaccccccagtccttcccttggaagttgcaagccttcagttgactccagagtttcaaaataattacatcagacagattctgctagtgcaattgcactagcagaaacagtggggaaacagattcctggtgctttctatactaacgttttctcagaatctttcatggacatatgtttttatttccctgaggtagatatctaggaatgtaattgctgggctgaatggtaattttacgtttcacattttgaggcactgccaagcttttccaaagtacctgctacattttacatttccaccagcaatgaatgaaggctccagtttcctcacatccttgcaacgcttgttattatctatctcttttattatagtcattctagtgagtatgaagtagtaactcactgtggttttgttgttgttgttgttgttgtttttgagacctgctctgtcacccacgctggagtgcagtggcatgatctcagctcactgcaacctccacctcccaggttcaagcgattctccttcctcagcctcccaagtagctgggattacaagtatgcaccaccacgcccagctaatttttgtatttttagtagagatggggtttcaccatgttggccagactggtctcctactcctgacctcaagtgatccacccgccttggcctcccaaagtgctgggattacaggcatgagccatcactatggtttttatttacaattttctagtgactaagagggttgagcatcttttcatgcacttattagccattcatttgcctactttatgccttctttgtgtaagtttgccttctttgtgcaagttatgttcaaatcctttgtctgtttttaaatgggatatctttttattattgagttataagaattctttccatgttctgcataccaatcctgtatcagatagatgatatacaagtattttccctagtctgttgtctttacagtttcttgagagtcctttgaattaaaatcttataatgttgaagtcaaacttacctatcttctcttttgatgcatttgatgtcacatctgagtaattattgcctaacctaaaatgacaggcttactcctgttttcctctaagagctttatagttttagcacttacaatttagatctatgagccattttggggtaatttttatgtaaccagtgtgaggtaagagtacacattattttttgcatgtcgatgtctacttgttccagcccggtttgttgaaaagatgatatccctccattgagttgtcttgacaccctcattgaaaatcaattggccataagagtatgtgtttatttctgttgaactatatgtctaccaatatgccagtacagtacagtcctgattactgtagctttgtagtaagttttgaaaatggaaagtgtgaatgctccatctttgttatttttcaagattattttgactttgcaaggtcccttgcatttccacataaattttcagatcagcttgttactttctgcccaaaatccagctgagattttgataaaggttgcattgattctgtaaatcagtttggggaatactgccatttaataatattgtcttctgatttatgaacacaggatatctttccatctatttatgtcttctttaattttttttcaacgttgttattttcagtgtacaagtgttctacctccttggttaaacttactcctattttgttcttttggatagtattttaaatgcagttgtttgttttcttaattttgtctgtggattgttcattgctagtatgtagaaatacaattggttttatttttgtattggtcttaaatcctgaaaccttgcaaactttagttataatagtgttttaatggatccctcaacattatctatgtgcatgatcatgtcatctacaaatagaaataatttaattttttccctttcaatctcagtgctttttattctttctcttaagtgcttgccctgtcaagaatctccagtacaaagttgattatcagtgtgacagtagatgtccttgtcttttttcttatctccggggaaaagcattctgtctttcaccactgagtatgatgtaagctgtaggtttttcatagatgccctttgtcatgctgaggaagcgtttgtcaattcctagtttgtttgagtgtttgtatcatgaagcgatgttggattttgtcaagtgctttttctgtatctactgagataataatgtaatagttgtcagttttccattaatatggtttattgcattgatttttcatatgtatgttgaaccaaccttgcattcttcaacaaatcctacttggtcatgctgtgtaatctctttaatatgttgctgggttgtttttgccagtattctgttgaggagttttgcatctttattttttatacctccattaaagtgatcatgtgatttttgtcctttattttattaatatggcttttgcattaattagttttcatgtgttaaaccaacctgtattcctgaggtaaaactcacttttatatcttactggatttagcttgctagtattgtgttgagaatttttgtgtttatatgcataagagatattggtctataattttcttttattgtgatgtctttgggtttggtattagggtaatactggcttcacaatgagctggaaagtgtcacctgttcttatatttttgagaggcgtttgtgaagggaaaggtttctgttaattctttaagtgtttgataggatttaccaatgaagacatttggagctggattcttctttgtggaaagttttacaattactaatctcttttcttattataagtctattcaaactttctttttattattggcttagattcagtagtttgtgtctttctaggaatttgtctatttcatctaggttgtctaattttttggcatacagtaatacataatattcccttaaaatacatgctttttatttctgtaaggttggtagtgatgccttcttattattggttttagcaatttgaatcttctctcttttactcttggttagtagagcgataggtctgttcattttattgattttctcaaagaaccaactttttgttgcattgattatttaaaatgtttttctattttctattttattaccttttgctcaatatttattttgtcctttcttctgtttgttttcagtttagattgcccttctttttctagttttatatagtggaaagttatgatagcgatttgagatttttcttcttcttttttttttttttttttttgacagagtctcactctgtcacccaggctggagtgcagtggtgcgatctgggcttactgcaacttccacctcccaggttcaagagattatcatgcctcagcctcccaagtagctgggattacaggaatgggccaccacacccagctaatttttgtatttttggtggagatggggtttcaccatgttggccagactggtctggaactcctggcctcatgtgatccgcctgcctcagcagtgttgggattacagacagtgttgggattataggcaggcaccactgcacccagccttttcttcttttttacgtaggtgtttataagcacagcttttctccaagcagtgttttatctgcatcacatatgttttggtatgttgtggttttgtttttattcatctcaaaggactttataatttttcatgtaatttattctttgactcatttgttatttaggagttcatcgcataatttccacttatttatgaacttcccaaaattctttctgtttttgatttctaatttgattctgttgtggttagagaatatattttgcatgaactaaattcctttaaatatattttgttttgttttatggctgagcatatggtatcattgttaatgttccatagggagataagatagatatgcatatatatacacacatacacatacacatacatacatacacacatctttggtctagttgttctatagggttgttcaagtctcttatatcactgttgattttctgcttatttgttctatctggtattgattatttaaaccatttgcatttaatgtcgttggtatggttaaatctacaaattccattttgctttttgttttctatttatatcagagtactttgttcttctgtgacttctttactacttccctttaagtgtatattgtcagtcataccttttaatttcttattgatttttaattctattttcttctgttattttttagtagctgatctaggccttataatatacatcttaatatatcagaatcaatttaagatttatactaatttagttccagtaagatataaaaacattactccttagtagttttattccctgctctatttgttgtactattattgttgtacatattacatctatgtttgtcataggcccaataattatatttttatatcattttctgtcttttaaagaaactaatagaagagagaacaaaaatatattcatagagtctgtacaaaatatatcaacctcttaccatttttgtttttctttctttttcctgtggatcatgttaccatctgatgtcattttcttactccaatgtagctgtgttgtaaacggggtaataagttccccttttagggtgtttaaggatcattccaacatgactatgcaaattgcacctggagagacagatgccattaaaggatttattatacttgcaggtcctagagaaggaggcatggcatgccacaccatgcatgggatcatattggaggagctcctagggagcagactcaacagagcaggtggagagataagtaacagtgtggatccctgggcaagtgcttttattaggggtcagggtatcatgactcctaataaaagaatcatgagaagatcttactggttcatttgcatgttgaatgtcactaggtcatagtcaggggacaagaaggggaacttgttgcagggaccatccttctcacactggtacacctggttgcctgggcatgatgttcacagcctgtttgtgaggacgttgaggcatcaggaaaatatgaagttttaaaaatttacaaaatttcatttctaccctcctcctttttgttgttattgtcaaatatactacattgctatacattatagtcccaacaatgcaattttaataccattttatgccattgctttttgaatcagctataaaaaaaatgagaagaaatattcaattacactgtcttttataattccctacaaaattacctttattgatgcctctgattttttgtgtagattcaagttactgcttggtgttgcttttggccagaagaacttcctttaatatttattgtaagacaggtctgctagcaagaaatcatctcagtttttgtttttcttgaatatctctagttcatcttcatttttgaaatatagctttgttggatacagaattcttggttgaaatttttttcttttggtactttgaatatgtcaccctactgctttctggtctccaatgtttctgataagaaattagctgtaaattttatgatgattttcaactatataactcttttctcttgctgctttcaagtttttctccttatctttagctttcacattttcactctgtgtctgtgagcagttctctgtgtttatcttacttgaagatttttgagctacttggatatgtagattactgtttttcctcaaatttagaaagtttttggctattatttcagagaatcatttttctacatttttctctgtcctctcctttgggactcccattctgaatatttgtatagttaatgatgttttgaatttttctgagtctctgttcatttttttccttcaaattgcataatctctattgatctattttttaatttgctgatttttttattgtgccaactcgaatctcctgttgagcctcttcagtgaattttctcatttcacttattgtacttttcaactcaagaattttcagtttgtttatttttatagtttctacctcttttaataatctcaatttgataagctgtaatcatcccttcttttaactctttaagcatgtcttcctttatttctttgagcatatctataatagctgctttgaaggttttgtctgaggagttcaacacctgtgccctcttaaaggcagtttctattgcctgcttttttccctgtgtatgagtcagacttttcaccaaattcttcacactaccattctgaaattactgcttcccttttttttggataacttttgtataactttttatttgatataataccaaatttacagaaaagttacatagtgaaggaatttatcatataatttttagtcagatttaccaatttttcacattttgcctcgtgatatatccttatttctttgtatgtttatataaagaacatatatatctatatgtttgtaacattttttggactattagtgagctcagaaaatcacatatgtacttccaaagaacaagaacttttttttttttttttgagatggagtcttgctctgtagcccaggctggagtgcagtggtgtgatcttggctcaccctaacttctgcctcccaagtcccagttcaagcaattctcttgcctcagcctcccaagtagctgggattacaggaatgcgccaccatgcccagctaatttttgtatttttagtagagatggggtttcaccatgttggccaggctggtcttgaactcgtgatccacctgccttgggctcccaaagtgttgggattacaggcgtgagccgccgcacccagccaagaacattctttttaataatcatagttacaatgatcaaaatcagcaaactttaagttgatgtgatgttattatgtaatccacagtccatatgtaacttttgtcatttgtcccagtaatggcttttatagcacttcctcattctccagtcctggatcatatattgcttctattctgaaatggtttcttggccttcctcctgtccttgacatgtttttaatagtactagagagttattttacagaatgtctctcatttgggtttgtctgatgtttccttaattatattctttttcatgtgacgtttcattattggctatttgcatatatttcaaatcatttgcccaagtttaaggcaggggattgtttgcatttcatttattgggttctagggattctttatacatgctagatacaagtggttttatttttgtaagatattttttacgaatattttctctctaccagtcacttacctattcatttttctaacattgtcttttgatgagcagaagtatttcattttgatgaagtgcaaactataaattttttcttttatggtttttttaggcatctgtaagacatctttgcttatctcaaggtcaagtagataggttctgatgattttttagaagctttatatattttttatttaatatttatcatttttcaactttttaatgtatcccatctggttttcttttctttctttttttttttttttttttttgagacagagtctcactctctcaccaggctggagtgcaatggcatgatcttggctcactgcaacttctgcctcccgggttcacgcacttctcccgcctcagcctcccgaatactgggactacaggtgcccactaccacgcccagctaatttttgtatttttagtagagatgaggtttcaccatgttggccagactggtctcgaactcctgacctcgtgatccacccacctcggcctcccaaagtgctggtattacaggtgtgagccactgcgccagcttggttttgtttttgttcctctgttcttcctatttgttttgttcctctgttctgccttttttggggttaattgaatttttgggtgttccattataaattttattttagcgttttagctaaacttctttgcattaaattttttagtgttttctctagggatcacagtattaattctgaaattgtgactgtctgtttagagttagtcttgtaccacttcacgtaaaatgccagaaccttgtgatagtctagtcatacatacaactcctacctttatgttatagtcacatattacatctacatacattgtaaattcataatagtttttttagttgttatatgcatttaaataaatttagaaaagaaaaacacgtactttttaatatttacccacatatttaccacattcattatgcttcattctttctatagctttcaatttcaatctggtataattttctttcatcctaaaaaacttttgttttgcatttcctgtagtacatatctgcagtacatatcactttttagaaaagtgtagtacatatcactttttagataagtgaaagtacttttcacttatctaaaaatgtctatattttgccttcattattgaaggataatttttctggatatagaatattgggttgttctttgttttctatcagcactttaaagagactattctgttggcttttcttatccattgttggtcatttatattgttgtttgcctgtttatgatgtgtcatttttctctggctgttgtcaagatttcctcttcatctttggttttagtacactatgctgtgttccacacttctgtgaggtctatgatgtgccttgttgtggttttcttggagtttgctaagattcttagatctgtaacattatcttttccaccattttggagaaatgtttattcgtaagttctccaaatatttttaatgcccccccttccctttccccttcccttccctttcccttcccttcccctcccctcccctcccctctcctccctctctctctctctctcccgcacccaccccttccctctccttccttcttctctctccttttccctctttctctctcctgcttcttcacactccccccactccctgtttctgggactcaattaaatatatgttagaccaatcaatactgcaccactggtcactgaggctgtgttcagattcacttttttcccagtctttttctctctgttcttcagattggatcatttctattgatctctcttcaatttgattgatcctttcttttgatgtcttcaatctgctgttaagcccatttaataaatattttattttagaaattacagttttcatcttgatgatttccatgtgtttcttctttatattgtatgtttctaatttgaaattctttatctttttatatattatggctacatttttgttttaagtagcttctttaaagtctttgttggctatttaagcattttggtcactcaggattattctttcttaggtgttttttttctcatgactatgggtcatattttcctatttctttgcatgttttgtaaattttgattatatggtagacattgtaaatgatatttcataggaactctggaacctatgctgtcccgaagattattgattttgttctagcaggctgtttgttacctgtgaactctgtctctcctgcagtgagcagtagaaaaatcttagttcatttccctcagcctcccagctgttatcttctgcctggttccttggagtctccccagtatgtgcagaattcaggggaggggagccaagaattaggatagggtttacatgtggattttggtgctcctctctctgaagttttttccttcctaagatattctccctcagtttccatctgctctggcagccctaaattccattcttggattcatcaagcccataagattatggctttgtatttgagctccagccactccacaacacacatacctgagagcttttccaggtcaaaagccctacacacataaatcactcctactgcaattccctttttttaagtgttgattccaaaaataaaaaactaaaaaataataaaaaagaaaagaagagttgattccactttaatttctgctttcagttgctcataactgccttcaaatgattgtttttcatcttttctccacagtttatacttatcatcagtggaaagttttactgtggtgtaggctactctaccacttggaagtctaacctacctttaaatttgaaggatatttttctggagtttagaatctatgttggcacttattttctttcattggagttttctatttaaaatacttagctctgagagggcatcactgctgatactgacctgaaagttggtgggtacagagaccctggagaaggtgatgcagggtagatggcagaaccctgctatgggaagaaagtgagggaaagcactgttggaaagggaggtgtaaagactgaataaaggtgggtgttttccctgtcttccctaacgctgacctcaggtagactaaatcacctcttcaaactgataagggaaaggtgaaccaagagtcactctttctgggtctctctacagctctctgaggttaaatgaattgatattcaaagatctgaaaggattctaatacccagaagcccctctagtttgtcagttctcttgtttggtgtgatctgttcagttctctggtcgggcactgtcctgggtactggtaaaagagcagtgaatataataggcatagcactcacccctcaaaacccacagccttgggaggaagggatgttcagcagacacctcccaaacaagttattgatgacaaccttggtgagcaatgtgaaagaacggtaccgggagctaagaaagaatccacaggggtccaaacagcctggagagtggtgtgggattagggaatctgtagggtgaacactaaagctttcatacataattatgtgctcagatgtatggagtcagggtacagatatttttctttgcattgtgtaggtaaatataatggattgaaacctttaaaatgccatattaaaatctgttctcattctttatgtggattaacttttgtagaaatatttctatagaagctgagactaatgatagaactctgctataagctgggaaggaggctgtggtcagttagggtggagggagagggagtggggcggcccccacattaaggggtctttttagatgcaggactcccttggattctgtgggtgcccagatacacactgacaaagtgctgtgccccgcagcagggcctggaggctcagccctctggtaagttcattagaagccctgaagaggccctggcggtccagatttagcttaaagagtaagttttctttaacttggacttggagctctcagaactccaggagtggaagggtggaaggcagatgctggttgaggggacactgaggtggcctgacttgaccttggagctccagtgagaagcactgtcttcgtgtgaggagcaaaaggaggtctgggaggtattgggtatttgccacattgcctttctaattacggttttacatctggcgtttccttgaactttactgcggcttggggaacgcatattcagaaaggcgagttacttggcccaacagagatgatgttccattgtcacagctgtggggtgtttccacctggaatgtccacatgaaggaaacagttctccacctttgcagcctgcggactctggacagacattcctctgtgaccctgaacgtgttttcatcacttacctggcagtggtttgagcccatcgggctgtggggatcaggaagcacaggggtcagctggaaagccaggtgtttgtcctgtgactgacaatggtgactttgaagtgagccatttgcttggaagactggcgcttacctgctgccagggcatgccgggcatgtgtgctctgggagcctttgtccataaacagtatcacgtggtggtgaggagtgggctgcagaaaccgacagcagggctcagcttgtgcttgctgcatgccatgtcctggtttcatttgattatagtattattatcctccttttgcctatgaggatactgaggcctggcactggtaggtggtagggtgaagatgccaccccgggactgcctaacattcaagtttttgccaccttcctccaccccatgttatgctcttatctgtatgaagatgcttgggacataaaacatgagtaggttctgaaaccttccatgtgacatgagatccatttgttgtccctttgtcggtgggcaacctttgcctccttgtgtgagtccactggtggtcttggtggtcttggtggtctgggggtgctgtctgcatcttctggctgagagtagggtggaaggacctacacaggtgagtctgcatcccctcccatgctcccccctccccggccctccgcctacatctgcatctgaaccctctgccccgtgcagctttctcacaaccatgtccttcaacccagggagaagcaagcctgagcctctggactgatccgggcttggcaggagggggtgcccctctgcacacccacccacagggctcatacacactctcacacacacctctggcactcaccttgttcttcccaacaaggacacttttcatttgcaaggtgtccacatgaccttgatgtgttgcgtaacatcatggtttctccagagtgttaatcctttcccagttagctgacacatcacagtggcctccggttcctttccccagacgaagaaaccccatcagacccagtgcatgatctctcggggctcctccagcctctgagttctggcctgaccctgggtaaggcttcttggcaggcagagccatttcagtgggagatcctgtcctttggattctccagcttctcttgagccccactggggacagctcagggctctgcccttcactgggtcagcacctgcaagaggcgggaaccacgtgggtctcatctgtcactgtatcccagtgcctcagaagcacctgcccatgctgggtatgcagtcagtgtgagtatagacgccatatctgctctgctaccttaggcaagttaataaaccgcttaatatcagaaatgttctctgctgggtgcagtggcttacacctgtaatcccaagcactttgggaggccaaggcaagcagattgcttgagctcaagagttcaagaccagcctggccaacatggcgaaaccccgtttctacaaaaaatacaaaaaattagccaagtgtggtggcgtgggcctgtgttcccagctatttgtgggggggctgaggtgggaggatctcttgagcccaggaggttgaggatgcagtgagctaaaaatgttctcatctccaaaatgggaatattaaaagttcttggggattaaatgagataattcaggtgatagctgcatgcttgataagtaatttgcagttgccatggttaactccaaattcaggcaatggaaaactcttgcactgagctagagctcagtggcagcctcaggagatggcactgaggggaacagatggtgactcctaggccaccctcaccatcttcactcttccccttacaccgtatgttttccttctccattgcctcttccattgaatccccggcagctaccacctctaaaggactcttggggatgagggggttgctgactgactaacatattgcaggggggattgagggggtgacctttggaacacctgggcctttgggttgggccaccagcctagaactactatcattctgctgtttgatagcattgtctgttgctttgaatgtgaacacagatgatgaaagcaaggatgtcctttgaagcctaaaacagtggtaaaggatttgaaaaatactgtttctgtccaaccctcattttatagataatgatagcatgatcatgagtcaaatctggtgaggttccaagagtttttggcagagccgacacaagaccggacatttttttgaagccaaattgtatgaacattgagagctggagctggtgaaactttgttcagcttttgagggattggctggtagggaggatgaacattagaagaaatctaaatattagagccaactcgggcacacacccgcaaatccttttctctgtttgtgttttctttgcatttctcccatcatttcccattctgtgctgtgtacaagtggtaaatgtgaattggttaaatattcaagcccccctttttaagtgtgaggattcgtcatacctaacagtaagaaatagctttctaaataaatggtgtgatagtatatggaggtagagcatactgtaacagtcagttatggaaggcatggacaccactagctcagtattctgtagcaggaatattgacctgtgatcatgcatttggtttccatgaagagtgagggatttttttattcaggaagcagctgaatttatatggattaaatgatcatcatgtctgggatgatttgcttagaaatcacctcataggagtgggatggggtgtgggggtaaagatgaagcaagattagccataccttgagttcattatatgttgttcatatttttgtatctgtttgaaatttttcattgcattcaaaaaagaatttcaatgtaaataaataatggtacagtagtatatcaaaatattaggtagccattaaaataacacgtgaataattttaatgatgtggtgtaagtaagaaaatcaggaagtcaagcttcctaatatgatatgtgtgcatgtggataaaatatttgcgtaaaaaattattggaaggaaatgaaaacattaactgtggttatccttggttggttggattatgggtgattttcattctattttccaaacttcctgtagtaaacaagagaaaaaaatcatttcttataatttgagaaaagcttttttgaaagaaacctaatctgcggtgtgtaaattagtgaagcatttgtttcagtgatctgttttccattaaattgccccagtcagtgattaaacgcttatgcggttactgatcttgtggctgtggatatggttttggcctgtactgtgctgcactctgccctggactgtctttgctggggtgtgtgcaggccagatcatggcaaatgcagtcacgaacaccatttcactcattggtaacttctgctaaccatgtttctttaacgtgaatttccatataatttcagcgagcttgacatgatttccacaagggtgatggacattaagcttcgggaggctgcagaaggccttggggaggacagcacaggtaaggccctgcttcccctgctctggggagggcacttgctttgttgtggggcagggagagggactgacagaggcaggcctttggggctttctgtatgaaaagtggggatttagttcccagtgtgctcagatacccccaggcccttcacgctgtgactgggggcacatgaacattatttaaggctgctcggggcagatttcctctgcttctgtgtcaagcacggggacctttcagctcattttcctcctttctggaggtaagcatgtccccatgtttggctgacttgaatgcaaaggaagaggtactaaatggattcattcaccatctaagaatatccaaaggcatcagtaggaagctgagcaaagtacctgatagcctgatcatctgtaaaaaaataattacatcaggagagagcctttgatccctctccttcatgacttttgttctgaaggagatctttagtatgttgtctgctgagctgagttctaggcccatgaatcaccatctcataagactttctaagagttctccaattatgtcattggtttactgttatccaaatattgctatttatgtcctgatagagttgtaaaattgacattaaaaaattaatctccccacaatgtaccttttctctagatttgccattcatatactccctttattttggtgaccaaggcctccatctctctcttatttacactgaaaatgccagtagtgattttctttgatatagttcaggagaaacagctcccaataatattaaatcctagctgctagccactagcttcagatactaatttcagcaaatactccatttcagatattaaagatagattttttcttattatttcatattagaaccatttttcctctgtcacatttcaatggataccaaataaatccaaatataaggtgagggtttttagatgagccctgaaaaaaaattgagtttcacattttctcatattatgggacactgaattattacttattgtaaacaataaatgtttgaataaatatttcatcagcctgaaatgacctcaataagtgctagttctgaatacatacagaggttactgaagaaaagggactaagttttctttttttcaaatagtgatcttaagttattcagaccaaccctcttccacttaaaatttaaaattctagataagaatattctttaaaatatttttcaaagtaagaaataataaggccagaattgaaaggaaaatgggccaggcacagcggcttccacctgtaatcccagcactctgagaggccgaggtgggaggattgcttgagcccaggagttcaagaccagcttgggcatagtgagactctgtctctacaaaaaaatttaaaaattggctggacatggtggcacacacctgtagtcccatctacttgggaggcagaggtgggaggattgtgtgagcctaggaggttaatgctacagtgggccatgattatgccactgcactccagcctgggcaacaagcaagaccctgcctccaaaaaaaaaaaaaagaagaagaagaaagaaaagaaaaggaaaatggcaacctggagagacaacagagtataaaagccactttgcccttagatcatttaccagtcttggaaattttcatgtcttcatggggtggaaggtgagagcaagggtcaaatatcaaacgacaaggcctgtataatgtaggctgtctaatagaagacactctctacaataaaggggagccaaggagctaccaaatctgagtaggtgtgaactaggggtaaaccaacccttttgtagatttgtagcttgagtttgcatcatttgggtaattcagagaacctcaacccttgaacttgattaatattgcttctagactggatgcaaacccaggtactttgcagaagcaaataacattcactaaaggaaggtgccttctatttagacttcaaattatcacagaaaatatattttcagtatcatgacaagcatatagtcagtaataaccaggcatctaaggcaacaggatactatgaatgagaaccaacatgctgtatgttgaatggtgctcccaccaaatccatatgtcgaagtctccagtatctccaaatgtggctttacttgaagactgggttattgcagatgtaatttgttaagatgagatcatattggagtagtgtgggctcatatttgttaagatgagatcatattggaatagggtgggctcctactccaatatgatgggtgtccttatgaaaaggggaactatggccacagatatgcacacaaggagaacaccatgcacacatgaaggcagacaagagaaacagacacatgaaggcatcaatatcagaattaccaaatacatcctataaaacaactatgcatactatgtttgaagataataaaaaagttttaaaacatccagggaaaagtggcatagcacccagccagtgcaataaagccagagaaaggaataaaaggcagagaggtggaagaaagaaataaaactatctctatttatagatgacatgtttatacaacatatacaaaaaagcacttagaactgttacacaaatataccgagattgcagtgcactctttaaaagtcagttatggaagacagacatacagttagctcaatattctgtagcaagaatactgacaagtaataatttaatttgatttccatgaggagtcagagatttttttcatttaggaaaaagccaagtccatagaggtgaaataataatagtgcctgggatgattttttttgaaataacccatcagaaacagggaggaggaggggtaaagatgaagcaatcaaaatcccagcaaaactttttgcagatattggcaagctgacttgaaaatgtatgtgaagaagcaaagaactagaataggtaaaacaattttgaaaaaacataaagttgaaagcttcatactacctgtttttaagacttactataaagctgcagtaatcaagacagtatggtattggcaaaaggatagatacacagagacagaagggagtagagttcaaaaacagacccatacaaatatggttaattaattttgacaaaattgcaaaatcaattcattggataaaagataatattccaacaaatggtgctgtaacaattggacattcatatgcaaatatacctcacagattatacaaaaattaactcaaaatgtgtcataaacctaaatgtaaaactctaacgcctttaaaagaaagcatagcagaagatagttatgaccaaggattaggcaagggttcttagatataatacctgaatccataaaaggaaaaaatgtataaattggacttcatcaaaactttaaaatatggtctgtgaaagacacttttaagaaaatgaaaagacaagtcacagactagaagaaaatatttataaatcacacttgatataggacttacatccagcatatatttagaactctcaaaattcaaaaataagaaaacaaataactcagttacaaaatggggagcaaattttaaatcatgctttacctaagaagatgtacaaaatggcaaagaagcatatgaagaaatgctcaatatctataatcattaggtaatgcagagtaaaactgcaatgagataccaggacacacgtattaaacgtctggagaaaaccaccataacaacaggagctgataaggatgcattgaagggaggaatgcaaaatggcacagccactttggaaaaacattttggcagctccttgtgaagttaaacatacacttagcctatgactcagcaatccaactcctaggtatttactgggcagtgaaaacttatgtttacacacacacacacacacacacacacacacacacacaaactatagcaacttatttataattgctaaaaactgaaaagaacccagatgtctttcagcaggttgaaatggttcaacaaactggtatatccacacaatggagttctactcagcaataaaaaggaataggctattgatctggtataacatgagtgagcctctaatgcattgtgctgagtgaaagaagctggaatgaaaaggggacatactgtgtgacttaatctacatgacattctagaaaaggcaaaattataggaacagagaagttataagtggttgccaggggttaaaggtagcggggaatgttggactacaaaagggcagcatgaggacagtcctgtatcttgattgtggtgataattatacaactctatgtacaccaaaaagaatgaattttaccgtgtgtaatttaaaaaataagttttttttacaaggtatagcggatttgaaaaacaaaggaatttttagaaataaatgtaataattaaaattttattttaaataagttcatttaaaataaatgtaattattaaaattttattttaaattaaatttatgtaaaataaatgtaattattaaaatgcgtggttataacaacagattacatcagctcaagatagatcacaggaaattatgcaaaatgtaccatagaatggtaaaaagatggaaaataaaggaaagggaacaaggggcatagagagtaagtgaaagggtgtaatacccatttgagcacagtctcgggaggagagaagggctgagaattttctggattttatcaaaaagatgacccaacccacaggtttaagaaacccaatgaatcccaagaaggataaatcaaagaaaatccatatgaggtaaaactgcagaaaaccaaagaggatgaaaaatcttaaaatgagtctgagaaaaagagacagattacctggacaggagcaaaaaagtaacttatgcctaacttctcaacacaatagaagccacaaaacagggaaataatagcctaaatatccttaggaaaagtaactgccaaactattacgctggtacaaaagtaattgctgtttttgccattaaatgtcatggcaagagctgcaattacttttgcaccaacttaatagaacgttatacctaggaaaaaatgtatttcaggagtgatggagaaatgaaagcattttcggacaaacaaaaactgggttggccccagtaagcccccagtaaaacagattctacacaaatgcaccctcaggccaaaggaagatcttcctagtggacaatctggaatatgagaaggaatgaagagcaaagaaaacaataagcaagtggatacacctgtgtgaacatgaaataacttcgaggttttttttgacaatcagaattaaaacaatagtgcataaaaatggaattaaagtattcgaaggtccttgtattgacctgtaatcaaatgtgtagtataaccactgaaagaggaagcaaaaggtaagggttataaactagcaatggaataaatggaattttttttaaagatcaattaaaaaacacataagatgatagacttgtttttattaatatatcagtaattacagtgagtgtgagtggactagttaaattaattaattacattaattgttccagttaagagttaaagattattagattagataccaaaactctaaatatatgaatcttaactataaaggttcagaaaagtaaggatagtaataggatacagaagcctatactttgtgaacactgggtaaagggaagatggtgtagctacacagattgagtatcccttatccaaaatgctgggatcaggagtgtttcagatttcagattttttcagattttggaatacttgcattatgcttaccagttgagggtctcaaattttaaaatccaaagtctgaaatgctccagtgagcatttcctttaagcatcaggtgggagctcaaaaagtttcagattttgcagcatttcagattttcagatttggtctgatcgacctgtactaatagcagtcaaaatgaaatgtaaggcaaaaaacataactaaacataaaaagggccatttcacaaaatgttcatttccccagcaagataataattttacatttctatgcattaacatattatagaaagttgtattacagctcttttagaatttgtctagaaggctttccggtttttgcaggaaagcaacctccccaacaaataaagttgtaaagtggaaattgacaactaaagataaataagaaaatctataagcagagtggggttatttttaacacatctctctcagtaattgataaaacaaacgctttaaaaatcggtaaagatataaaatacttggacaacacaatttaaaaaaaagattttgttctaattgacatatatagaacactgaagaaaatgcattattttcaagcacaccaggaacatttttaaaaattgttcatatggtaagccataaagcaagtatcaacagatttgaatgggttcaaatcattcagagtatgttattggaccacagtgcaattaagctagaaatcaataacagatagaaaatcctcaactgcttggaaatgaagaagacgtactttcctaaataacccgtaagtctaagaaggtatcataatagaagttagaaaatatttttgaccaaacaataatgaaaatactgcattttaaaacacgtagatgcagctaaaacagacttagagggaaatgcattgccttaaatattatattataaaaacaggaaagtctaaaaagtaataaaccaaatgtttatctcaagaagtttaagaaaatagcaaagtaaacctgcagaaagtaggaaggaaagaataaagataagaacagaaattaatacaatatgaaataaacattcaactgaaagaattaacaaagcaaaacttttttaaggcaattaaaattgataagcctgtggtgcaattgatcaaggaacaaagaagaggcacatttatgataattaatatcagggtgagaaaagaggcatcaatcactatagatgttgtgaatgcttgaaagataaaaagatattattaataattttttgccaatacatttgaaaatttggaaaaaatacattttcagaaaaatgttacttaaaaaaacagattcaggaagtagaaaaatggactagtcctgtcaccattaaagaaatcgaattacaaagcctagtaggagaagaaatatagtttgaacaaatggatggctaagccctgccagtggaacaaaggtgtacagcagttatgcttgagctctgccagttacacttgaggagaccattaatgctgtaagcagcatttttgatggtcatgatattgaggctgtgtatctattcaggccttcgaggatgcataccaatttgttgactaggcaaaagccacagggtgtcctgaccaaatgcagaaaactcttaagaatctttcaaaatcataaatgctcattgagaaccatctactaacaacataaacattttttacgattataaagttgagaacacttccacactagaaggtgagaaaactagaaggtgctgtagaactgacttatccttggagagggatttgttctacctgtaatgatgtaggaactcctactaaagtaatcctaagtaattctccccatgagagtaagaccatgtaagcttcccaaggaggcaataatataaacacaacagaaagatcctgggttttttaaggaattcagtttattaaattattataaaaagtaataaattgtgcaaattttcaggatgtattagacagcatcctggtagtctacgatgctgcatccctccactgtcagttctgtaactattccgggaaaggaatgaactttgctgagcaactaatgtgaaatcatggaaacctgggtatgatagaattcatgggagagaatgaagctgtcaccagaggagcaatcacaaaatgttgaaaagtgtggtgaattctaataatccaggaagcatggcagagttgggctcagcctggccacacccctcccctgcagggatgaccagtctcattgtttttctcaccaaaagtcattagctcatcatgcagttggtgccccacagacccaccttcttgcccatgaggttgggcctcctctgattgtccttgatgctgtattcacactagacaaagcaattcataatttttattttattttattttttttgagagagggtcttgctctgtcactaaggctggagtgtagcggtgcaatcatagctcactgcagcctcaaatatattttagaaatcaaaacttgattatacatgagaggaaagttgctaattttgattctgtgatcatcttccaaagtgttcttgtgtcttttatttaaatatcctaaataaaaagaaacaagatgtgttttcaggtatgcaaaactggtataccatgtacttttgcgaagtaaaaggacttttcagaagcagataactgatgcatggatggaaatcttgctttctctcttttacgtgcctgttgcatacatgcacataaacacacactgtaacagtcttatttattatttttttctctaatctgtataggaaagaaaaaatctaaattcaaaacttttaagaagttttttgggaagaagaagagaaaagaatcgccgtcgtccacaggaagtagcacctggaaacaaagtcagacgaggaatgaggtcattgccatcgaatccgggccagtgggctacgactccgaggatgagctggagtaagttgcattttacatccctcgggccaggagcacctaaatacatgatttcattatcctggtaacttgctggatttctgagccccctttcctcctgggtaattccattagaggttcttccatagaagttgtgttttctgtcttttcaaacctagggatggagaatgctgtgtgtgtttaagtccacaataactgtgggagaggaggtactatatgccattttataaacggacaaaataagccctagataaaatttagaacttgcccaacatcctacagctgaaagtgacaggatcaggataggggccctggtttaacttgacttaaaactcttttgaggacctagatgctatattagaaaaatgcatttctctaaagttgaacgttaagtaatctaatcagaatattttcacttgatgggggtggggagggggcgctccttgctatcttagaaaaaaaatcatccaaaaatatcataaagaacagacccaataagcacaaaaaactggggaggtctagtaaagaaatccttatttttgtaacttgtgtttcattaaaatatagttacagtacatatgctgcagttattctagcagttattcctgtgactaagaggaaacgaaacagatttgttgctatgctagcttttacctttttttttttaagacaacgctggccctttaaggatagaactcttcagagaacataatatccctcaggtttggggtacagaccacgctgagatgggtcccaggcttgagcatcccaatagtggtgtcctgtcccctctcttgctctcgcccctccccagcctccttgcctgttttttaaaggagtagaaattttgctggccacttggtggcaccagatgactggaaaggaaagattggaacctttttttttttttttttcagttttgggtttgatttaggttttgattgtttttggtgctagcagggaatgtaatagactcacattgcaccatgtgaagtgtggaagggatatactgtgcatgcattttttttttttttttgagacggagtctcgctctgtcgcccaggctggagtgcggtggcgcgatcttggctcactgcaagctgcgcctcccgggttcacgccatcctcctgcctcagcctcccgagtagctgggactacaggcacccgccaccacgcctggctaaattttttttgtattttcagcagagacgggatttcaccgtgttagccaggatggtctcgatttcctgacctcgcgatccgcccgcctcggcctcccaaagtgctgggattacaggcgtgatccacggcgcccggcgtgcatgcattttttttaggcggttctctgaactcttggggaacgagatgttatcgcgataatattactaattattcaatgtcatcactttgcaagccccagggaaactctaacacccacccccatccacccctgtctcttgactggagcacacagttctggtgttggagagacaggcctgggagtggcccctccaaccacagacaggagcccagccagaggggcaagctgggatgaattgtcctgtccgcttgctgatgtcctccctgtcacaggagcccatggaaagtggagacggtgtgctttttatcttgatattcccagcaccttgcagggagctggccctcagtgactggtaacagtttgctggttttgatgctaggcaaggaagattgggaatggagcatgatgaggcctgggaagtgcaaatgacatttttagagagcagcacagaggaagaggcaagtactgcttggcctgtgggagagtctgcggcaacttctcatccatcactgtggggaaaacagctccatttactaaggcacattagtgcgagcaaaccacatgggaccctgtgggttgaataaagtgacgcccatttatcgtgtctgtgtctgtgcggttgtgcttcttaagtctgttaatctataacgatttccttttgccctctccctttgtttcacgtcattgatctgaaggaagagcagggccatgtgtcctgcagaatgtcccatattctggctttgctttctcttggtgtgactcaactctttcctatattctcccaattcccggtacatcattcgatggatccagattctgtcaggttcaagcaggtgctggttgttgtcacatcccatgatgagtcacctgctttctgagcagtgggttcagggtgtgtcactgtcgtccctccaccaaccttcacctgacagttttaacacctggtgatgatctgttattttgtcacaaagtggtggtttttctaattctatcattcactgtacacttgctaactgaaattctttgatgaagaactttccttcatcaattgcttggttgctccgaaatacaatttgtaaagtcaggatcatgcttggctctccttttattgatccaccctcagagtaatgacgtggccccctagcaactcctgacagtggccagtgggttttgtttttttctttttttttccaaatatcattgggaatgcattactttttatatatttgatttgctttaatccatgacagtctttattcattttaatgctcaagttgttccatcttaggctgttgagagtcacttgaaattcgctccgtcttttgacatgaccccattcatctttgatggcttccttactttcttgtccaatgagaaatctcaggtttatttggtatattttcttcccctgacctggaatcagcactttcttgacaggaccctggctccctccttgtggtgtgaaatggcttttaaagacctcagtccagctgccaggggcgatgattactaattggctgtcactgattctaaacctttccagtggatatagctaggaaatggtttatttttcaagagaaaaattaaccattaatttgctgatatttccaattcaagtttaataaaacaacatttttacttctttaattctttgtattctcttttctcttacacttgaaaccagggctccttatgatattaacaaaatgacttattttctttaacctatcatatatttataataatttccttatcccttccctatatggaagttaaaaatattataaatacttttctgcacactgtcttataatcagtgttattgctaataaaactacagagtgcaatttcatatttttggttttttaattattattactactaataagattagtgagtgcaatttgatatctttggttttcttgttgttgttcctagaatgtattctatcttggatgtggagtcaaagtcacttgaaattattatattctctgtgtggtcatgccaacaatctgatataaaattagatttatttgtttgtgtttgttttctagttttagagattgttttatttctctttttgtttggtttcatcttttaattatataaaacgtttgcatagtttcaaagacaaagttgtcaatgtaggtatctttgcactatgtctcctcatctagttatttctttcccccaaagaaaaccacttttatttatttgttatttattcttctattttcatttttttaaaatataagaaacacacacacatgttcagataatatccaggcccccctttcccatgcagtgctgacatgctgtgaacattgttctgcagtggttgttatttattgcacttagtagtatctggtgatgcctgtatgcagcgtgtagagaccttcctgcccatcagaccagctgtggagtcctccattgtatgacattcatggttgattcagttagatgcctactgaggggcactaggtgtttcccatctttcactcttttgaatattgctgtagtgaatggccttgcacatgtgccattttgtgtttttgcagaggcctctttatgctgcctccactcctcattacatccaaagcggaggtgcttgggtggtggttgtggttcccagagagtgtgggccatgggctgtccactgggggagggatatccaagtgtgtgtgtgacctttgggttaagagctgcccttggcagggaggtcctgattccttcagttggcgtagttccctccctggcatgtgaggacacacacatcctgggagccatgggttcccacttgcaagcttactgttgcaggcgtgagagtttaattagaaggaagcattattagccaacacagtttgatctacagttggacagggccacacctcagagtccttaatgccccacagtggacaggatgcccagggtaggggagtggcaggagggaagtgggtggggtggtgcacacaagatgtccagtgtgtgcagaggcaggctttccttccttcatcatcagatctcagtcatctccttccacctattgttcaggcagccagtgctgctaggaaaacttgacagctaattcccacatccttttaggacattttgtgaatgtcctgggggttcagtcccagatcagattcttgagttcagagctgaggaaaggactgggatggcgatgacagaaggccaccatctctgctccaggatctaggcaggcacagaggttttggtcacacagatggtgccaggtcataaaaagaggccatggctttgcagatttgcagttctcatttcaaaccacccacggatgtatgtcttggtctgtgtgaggtgtgtgtgaggatgcgttcatcaagcaggccctcagcctgctgcacacacagccttcagcccacggagggcctgcatgtttgcccacaaggcgtgacctcaccctccctggggcagccgggacaggcctcctcagaagctggccgtgccagcccctcccctctgcaggcttgctgtcttgcacctcacaccttatcaaaccttggttttttcattaatacaaaaataattcacacaacctttagatctcctaggaaaattcctatctctgcaatgctccaaatagttgactggcatttgacagcgtgtggatgaactgaagtcagggaccactgaaatgtaaatgcagcagagggagtgttgtttgatgttctgttcactcacatccctctttctcattctgagccccccaggggtcagtaagatggaggtgggcagagtctcacagtggctcttttatcctagggagtcgaggggcacgctgggcagccgggccctttctcacgacagtattttcattcctgagtccggacaggacgctactcggcctgtgcgggtgttttcccaagaaaatgtgtgtgatcggattaaagctctgcaggtaaatgtttccttggtcatgtcgcctggtgtgcaagtcaaatatccatcaagaagtttttaaatgatttctgcttggtttatttgatatgctgtaaagtagaatcacatgtacatgacagctcccccaggacacaccaaatgagctgcagtgggatctcgactcattcttagatgaacaaagaagagatggcagtggaagagctggtggcagatgcacgttcagttcagttctctgcaccacaccaagatactgaaggcatttccagcatgaatgaattagagcaggaggatttgttgataaatatcattgatgaaaataagagcacatgttctttattccaatctagttaaaaatacagtgtaatgtgaaaatggggccaccacctcctccaggggggcttcctgccaagcggggagaggatgccggcatgagctctgaggacgacgggctgcccaggagccccccagagatgtctctgctgcacgacgtgggtcctggtaccaccataaaggcaagtgcggcctgtaccactgcatgtcttcatccacacctgccctggagggtgctggagctctgagatcccctgtgtgtgcccctaagatctccaggctgtgcatggtgtggccaactgggtcactggagcctacaatcagcccttgagctgtgtttattttcattctttgagtagaaattcaggtctggttaggagacgtggttttggtgactttttttaatgagggtgataggttgatagaatcaacccagaatcaaccctgtcccttgactttcctgtctgagcagatgaccagacccagaaccccattagaagtagggaaacacgttgtatctgttttccgttgccatgacatttggccggtgggagggggaagtagtgagcatgtgatagttgaggctctgatggtctccggtgcctgagtttgtgaccttgaggtggtgttggcctaggggtagtaatgtgctgtattgctggcaaacagggcagcagggaaaggttgacaagcaagagaggaactgatgacctcagcagggtggaggaaccagtcccaaacaccaccttctccattagaatccaagaggggggccccgaggaactcggaaaagagcacgagctctttctcgtgcataaacaacatagctcgcgatgctgccacattttaaattctttatgttattgtggtaagaacacttaatgcccatacactgtacttgcacataaatgttaaaaataggtggtcatccttcccatgtagacaagcctgactgtggaggatggatagagttggagttatctgttatgctgacatttgaaaaacaaataaaggccagagtttattttttatagccacacaccttcccctgtcacctctggcctgctcgaggggccattcacagtgaagggggagcttcgttgcgactcactgccttgcagattctgtgcttctctgaattgtgttcagaagccacttcagtgtggacacctatacaccctgccacaccaaatttttgtgtgtagttgtgagttccccgaacgtcactgatgaaaaaggcaaaaggactgtggtgtggctgagtgtgtggggtggggactgacatgaagccggctagagaattattctctccagaattctgctctggggcgaagctgtccctgctcattccaggagcagggtctgaggacagtgggctacccaggcctgctctccagcctcgagcagaagggagaaaggatgaggaggatggggtggcctatttcatagacttcaccgagccaaccctgtaccccttttaacacctccaaatactcctgtgtgcagtttcagcgtccccctctcaggagcagatgtgacttagtgtatttctgagctatgcagtaggaagaggtctgtcatgagctgcctctttcctcatcatagatggactccccctcctcccatcccacaggtctctgactctcacagcatcccagttctctgcctttagccaggacgggcagtaagaggagaggtagtttctaacccatccattgaagagcaagcctatctccaaacccatgtgacactatgaggcacaaattccacagctggctcggctgggccagcctgactttatctctcacagcacaaccacctcctgtggttggtcctttatttaaaaaaaaaaagttctgagattttatcaattattgggtaatatggacaatctaccagcttcataggaaaccaaaatttgggcttttaagacttaaaaacagaaaggtaatctttagtgtcttcatcgttttgaagacacaatgattgcattttgaggcctgaaagtttttatgcataattggttgattaagagggaaaaacaacacaccctttaaaatgggcttgtagaatatgtggtatttgatgtaatagtgccttaagccccaaaagtatgggctgcagactgtttataccttacactgacccacaggcttacacacaggcccacatagacagaaaactttaagattattgtggaaaaaagagtctttagtaccaagtatttgatgttataaccaaggtgacatttcctgatagaataagtttttcaggaaatatatggaataatttttcaaattttatcaccaagtgtgataacaactgatgaaagtttacctggtggtttttaagataaaatgatgtctaactggtcatattctagttgtcctgctatgaagcaggacatgccaggtagagtgtgataaactggcaaggccaatgagtcattttgctccttggtgatgcgggaagggaagatggggagggaacacagatctggtggcaaatgaacaaatacatgccccacagctccggagggaggcctcaggcaggcttatcacctcttagaatctgtgtcctgagagggttttggctcagagggttttggggggatgagatgagattgggtagatcagcacctctccttcccagcaggaccagcggcttcttttcacccctcgaacagccaggcccccctgcttcctgtccagtggtccttcctgcatgcactgcccccagcccactcctcagcggctgagcccctctttttgaggacacacatcctaaagcacctgtcactcagggccgcccatgaaaagcttctgaccccagctgtttcctttgggtcctttgagctgccttccctgcaacagagagacacatgctagacttttaaatcctctgctttcagaatcatccagaatcacagattttaggaaaaattgggtgactggaagcaagccatgcagagctgaatgttctggatgctgccagccctcccatgaagccagcttcccagccctcacctcctccccatgggccccaaaccacctcacgtagttacatcactgatcaacaacagacacaattctccttggtcatgaagatgagggtctttctggaccccaagatctctcagagcaacagtggaaacagaagtgagagttctgaggccagaggagttgagttccctagttagggagagcttgtacctggggcacaggtcagggaagttaagctccatgccaaggtcccctaaccaggggccacagtgggcctgagcccaagacatctgcccaagcaggacagacgcagggcggcccacagggaggaggtcctgctgtgcatccttcagagccttcagggtattgggctttattctataaagaggagtggtcaggggtattattgtcacaggcaccgtgatcattcttactgcacttgcaaagcagctgatcttgtctattctcatgagtcctaggcagtgagattttctttttaaccaaatgtttatacattgttcctctagacaagggtaaatattacagattctgtatgcttatttttaaatgtacacatcctgtttgtgacctttaaggaagactctctgggaaaggtatcgatttcccaatctaaggtgacttcctgagttgtcagtgaccacagtgagagccaaagccacaggcacagatgtacttgttgccaggagacttgcggcttatttttaacataatttttattgctttattcccgtaagtacctgagtagctaaaagagaattcaaatagattatgtccacttttagccccctttcccccattttagtaattatctcctccttgtttacacagataaacttacacttttattggaaaataggagagaccttcacatgaacaagaagaggttgttcctcccgtatcgaagcccatctcaccagtacgatcatccttatggttccctgtccgggttagcaaaggctgctgggcacctgctctgtgtgggggtcccagggttattagaaaagaaacagcggatgtgcccatgaccctaggagttcgccactggggacggcactggtgtgttgtctcattgcctcattcactgttttcatgagggcttactgaattgttgtgtgaataaaactctattcttaagttaaatggaaacttgacactaatattgcacaccgtgctcgaatagaaggcttgcttgaagatcacagagttatacgaaaagcctgtcacctcctagagtctccctgtgcacctcgcccctcatctgggctgcatgtgctcacaggcgctccgagtttcatcccaacttgtgtctgcaggggagcccacttcgacctcactcagtggtggagctggccaagttcgggggcagggatctgcgggtattgccttcattctttcacatgactgccagcatccctttgtcccaggtgacatgtttgccatttgctatcagttcttccgtgctgaagtataaatgagtaaaatacctgtaacttaacagatggcaatgtccagccagatttcttcaaaaggatacatgagcacacagagaccttctaggttgaaccaacagggctccagtgatggaatactgggcagtgggctttgcacttcctgcgccccagcctctaaagtcacacctctgaaccttcccctcagcttccagagacaggaccaggtgactgtgcccttggacaaatcaggctggtgtgttttgagagagaaagctcttgtctgaagtgcctgtgccagccaccatgggagggtgacaggggagcctgagacacaggttctctgcatggtcttgggaaagagtagctggtttccaggagctggccccacactttaaactcccagccatttacctttctccagaaggatcctagacccctccttgttgagaatcaaattgaaagtattggccgggtgcggtggctcacacctgtaatcccagcactttgggaggccaaggcgggcggatcacaaggtcaggagtttaagaccagcctggccaacatggtgaaaccctgtctctactaaaaatacaaaaattagctgggtgtggtggcaggtgcctgtaataccagctacttggcaggagaatgattgaactcaggtggcagaggttgcagtgagcagagatcacgccactgcactccagccttggtgacagaacaagactccatcttgggggaaaaaaaaagaaagtatttccacacacgtaaagccagagacagtgtgggaagacagcctgggcagaaaagagcattgttgcgttggtcgtccttatttcacacggtgaagttcatgctccgtgtgtttgttccttgtcccacgaaggtctctgtcgtgtctccagaccacgtgagcgacagcaccgtctctgcccggatctcagacaacagcctggcaccagtggctgacttcagttatcctgcagaatcctcctcctgcctggacaactctgcagctaagcacaagctccaggtcaagccccgcaaccagcggtcgagtaagatgaggcggctctcatcggtaattgggtttccttctccacacagaggcaggccaggcaggcttggcacccccctatgcccccccccaacctgcctcactcccccacacagggtctcatgccccctctgagcaccccacagttgatggagccatgctgcaggagctgaagttgctcatctttttaaacataaaccagatctgtctctcccttgcagaaatgctccattcattcatccatccgtctgtccgtcattcctcacacactcactactgaatactggttgccttccccctgcactcagaggaaagtccacgctccaggcctggcacatcaggtcctgcctaccccccaggcttcttaccttctttctcactcagcgttctggccacctttctgcctcttgagctcaagagctgcctctagcctcaggccttggtgctgctgtgtcccagccttggggcctgagagtcccccagaaaaactcaccctgcccgttcacttccttcagaacactcgccacatgccaaagtgacctttgtaaatggatgtgctcttattgccagtcttctttgagaccctgtcctggctgcattttcagcccttagaacatttctagtcacagagttgttgaatggatgaaccactgaacaaacaaatgagtgaattaacaaatgagtgaatgaaagaagctgaaacactagcgtggacaactgtcttggatgagggcctactcagtagcatggggagcatgcctcggaaagacagacccctctttgggtgtgctgcctcagggtgtcgttacctcctagtcctagaagctgagaaactggctcatggaatactttggcttcatttactggcaggttcgaggttcacatagggttgttccctctcccctacctgacgggcactgtaacgcgtcccccctggagtggggaccagcctggccacagagaatgacagtgctgataaagagatgctcacaggctaatgtcctctgtccttccctcatgacatgattgtggtgtgttggtgaagtacccagggcaagctgggtgcctcagctggagacagttgggctagggccactcaggagttcagcaactccctgaagagagtgagttttcctttgggcatatggaaggtgttctttaaactcatgccagcagagtagacttttgaggggactaatgctggaggaagaagcaaaggtgagttaccttcaggctgatgtgccagctaggaaccaggatacttgtgcctaggtgtgtgtgtccagtgcatgcacagttaaaggctgtgtgctgtgtcagtgtgacaaggtccggtcactcaagacctgcctgtactcgtgctgaatgagactacagggccagggcctgctcccttctggccctcaagtctgtgatttatgaatcccacggggatgtctttggctctggccagggcgtttatagccagccacaacctggccaggacttggtgacagagcgaagcgtggtgtctattccaggtggaaacacagcctcccttcttgctcccatctgggcagggcttatatccttctttctttacatttgaacttgacttagttcttgaatcccactttgtagaataacagaaaacctgatgtagccagcctgggcaaacaggtaaacagcctttccttgatttcaactctgtcacatccatggtctttccctcttttccccttccctgcttggtaaggagcgggcatggatatctgaagttctcagaggtgtccatattttcctccatccactgttgtggaacctatgatgccgggggcctctgtccttcagtgtccatagcaccctttgcccgttggtcatgaggtccctcttcccaaccataaggaccttccttgtggcctggcccctctcagggatcaaggtgctttcagatgctccctaaatgctcccaggatgggaaagaacagccatgctgccccctctgctgccttgtgtgggctctgtgactgatagttttaaaaggtgacctccatcctaaagaggtttcaacatcagcagtttcctgtagtagcagaaggccatcaacatggcaaagtaaagaacctgcagcttttgaaagttcttctgtagctttctttgtgcctcttcctctttttaaatccaaaagaataggattgtgcattttggcaagagtttgcttaggtattgtcacaaacatcccaggcatcctatattctattagcaagcagatgccatgaaaaatgttaaaataataacaaacagcaagaagaaaaacctattgcaaacataccctgtcacagttcctgctttagaaaaggggaaggagagagcaatagcctgggtgactcttggtgtctaatatcacaaactttctaaaagatcagtctctacaccatcaaccttttcgtcatttccacatgttacttttgaatgattcttggttacctggagctcctttccttcccgagagagcaggaactgactttgtgacaataggaggaagttggactggaatctgaattctagaggtctttcagaagaagactatcacaaggcactgtatgtttgccaagccagtagggcttcaggaggccagagaaggggggaatcttaaactgcatagagtgggagagtttgaaatagtccttgggggccctggtagagtatcttggaggttgggggcaggggggtgggggagagtggggaggtgacagtcactcagaccaagtgtctggcacagtgttgagggcttggtttgacctgagtagggagtggaagaaacggcttaagaccagagaatctaggactttaaatttagctgaaaattttggttttatcctataagccatggttagctattggcatgatatgagccatcttttaggaaaaccagtctggctttactatgagggtacattcctgaagtgttgacatgggagactggctgggaggaacacagagccatagagtcccagctgttcagctcggccacctgcttgcccaggcttgaacaaggtattggcctctctgagttcctggctctcaagtgcaaaaagggactcatcatcccttcctcactgggatgaatggaagattaaatgaaataacaagtgtgggagcacagagcatagcagacactggctgctgttggtcgccttcccttggcgttactctagtccactggttttgaggctctgccagaggagctgtagacatttactttggaggcatatctgccattgtcctgataaacttgtgagcccaagtagaccagtaggatacagactgagaaaagacacccgtgggtacatgcctacttaagtgccagctttatagtgctgctatcactaaaccattataagccttgaaaaaagtggggaggtgacaggcttcctggaattggctatagcgacgatgctttttatctttatttctctcagcgcgctcagtctgaatccctgagcgacctgacgtgcaccccagaggaggaggaaaacgaggagaagccacttttggaagtcagcccagaagagcgccccagctctgggcagcaggacgtggcgccagacagaggccctgagcctgggccaccggcgcccttgccgccacccggaggggcccgtgccagacgcgcccgcctgcagcactcctccgcgctcacggccagcgtggaggaggggggcgtccccggggaggacccctcaagccgcccggccaccccggagctcgccgagcccgagtcggcccccactctccgcgtggagcccccgtccccgccggagggccccccgaatcccggtcccgacggcggaaagcaggatggggaggcgccccccgcaggcccgtgtgccccggccacggacaaggcggaggaggtggtctgtgctcccgaagacgtcgcgagcccgtttcccaccgccatccctgagggggacacgactccccccgagactgaccccgccgccacctcagaggcgccctctgctcgcgacgggccagaacgcagtgtcccgaaggaagcggagccgacgccgcccgtgctcccggatgaggagaaggggcccccagggccggcgcctgagcccgagagagaagcggagacggagcccgagagaggagcggggaccgagcccgagagaattgggaccgagccctccacggcgcccgccccgagcccgccggcgcccaagagctgcctgaaacaccggcccgcggccgccagcgagggccccgccgcgtccccgccgcttgccgctgcggagtctcccccggtggagcccggccccggttccctcgacgcagaggccgccgccccggagcgccccaaggccgagcgagccgaggcgccaccggcgggcgccgagagggcggcgccagagcggaaggcggagaggggcggtgccgagctgcgaggcgcgaagaagttctcggtgtcctcgtgccgagcgcggcctcgtccgggcgtctcccgcccgctggaacgggccagcggccgcctgcccctcgcgaggagcggcccggtctggaggagcgaggcggctcttgacgacctccagggtctccccgagccccagcacgcgaaacctggccctcggaagctggcggagcgcggccctcaggactcgggggacagggcggccagcccggccgggccgcgcaagagccctcaggaggcggccgccgcgcccggcacgagagagccctgcccagccgcccaggagccggccccgagtgaggacagaaaccccttccccgtcaagctccggtccacctccctctcgctcaaatacagggatggcgcctctcaggaggtgaagggtgtgaagaggtacagtgccgaggtccggttagaaaggtcgctgaccgtgctcccgaaggaggagaagtgtcccctcgggacggcccccgcccttcgaggcaccagggcccccagcgaccaaggaaaggggaaggcccggccccccgagccgctcagctccaagccgcccctgccccggaagccgcttctgcagagcttcacgctcccgcaccagcccgcgccccccgacgccggcccgggagagcgggaacccaggaaggagcccaggacggcggagaaaaggccgctgcgcaggggagctggtaagagcccgccgagggtgcgggaagggcagggcctggggagatccacatccacgggcacatcttgctggacactcgccaaatgctcctggtacaaactttgttgcaggggaattggaaggagtcagaattcccactaacatcatgtctgatctagagcaagcttgtccaactcgcggcctgggcccggggcggctttgaatgtggcccaacatgaattcgtaaactttcttaaaacattgagactttttgcgaatttttttttaagctcatcagctgtccttagtttagtgtattttatgtgtggcccaaggcaattcttccagtgtggcccagggaagccaaaagattggacacccctaatctagagtaaggaataggccgacctcggtagctcatgcctgtaatcccagcactttgggaggccaaggcctgctgataagcccaggagttcaacaccaacctgggcaacatagtgagacgtcgttctacaaacaattttaaaactggccaggcgtggtaatgagggcctgtagtcccagctacttgcgaggctgaaataggattgcttgagcccaggagttcaaggctgcagtgaactatgatggtgccatgcactccagcctgggtgacagagtgagaccctgtctgttttaaaaagagagagataaaataaggaataaagagtagaaaagggaaaataaataccaggattttgcataagtacagagaagtcagtgtgtaaacatgagataaagagaaacgtaaaaactgattttgataggactctcagcgaatccctcaaattcttctcccacttttgacctaagaaactcagcaaagtccaaatcccaggacatgtgtactcattttgatgcaggttctttcagggcctaagctatttcttggctataaatgaaacatactcctctattagggtccttctgaccttttcctccaagaaagaatttcctcctgcttcataatcaggttcacgtggctcagctgcaacatggaaagtattccatatattggaatcacaagtctgtataaaacgtaagtctctcaagagggtcagcatttacttgctgtcctgaaagggagattgggttaacattgaggcagaacgtaagaatatttgaaagcagctgtcttttgaaatgagcagagacaaagtagatgacctttctctgtctttgacatttgtcacttcttatagtgtttcagatgaaatgagaaatctgttgaaaatgtgtatttgcagcagagctaaagaatctttcattgctgggttttttgttgtttttgttgttgtttgtttttgagactccgtctcactctgttgcccaggctggaatgcagtggtacgatcttggctcactgcaacctccacctgccgggttcaagtgattctcctgcctcagcctcccaagtagctgggattacaggcacacacgatactacacccggctaatttttttatatttttggtagagacgaggtttcaccatgttggccaggctggtctcgagctcctgacctcaagtgatctgcccgcctcagcctcccaaagtgctgggattacagacatgagccaccatgcctgacctgctggttttttaaattaatggaaatctgtgaaccagaaaatgaaactacacaaataagttgtgtgtgcatgtgatgggggccctagggagaagttttccatgacaaattttgttttttaaaaatgttttggcccggcgtggtggctcacacttgtaatcccagcactttgggacgccgaggcaggcggatcacaaggtcaggagttcaagaccagcctggccaacgtggtgaaaccccatctctactaaaaatacaaaaattagccaggcatggtggcgcgcacctctaatcccagctactcaggaggctgagccaggagaatcgcttgaacccaggaggcggaggttgcagtgagccgagatcacgccactgcactccagcctgggtgacagagcgagactccatctcaaaaaaaaaaaaaaaaaaaaaagaatgtttcaggctactcaagcagtgtattgtgggacagagaggaaatagaacccagtagctttcttagggaatcctgcaccctaagaggaagatgcatacataggaagaaaattagctcatacaaaacaatgtgaaaacagttccaaaatagtctaatcttttctggctcttttacagtgctttaaattcctaacgtgacacacaaggattcacagttccaaagagcccacacatgtggccttcccaatctgaaggccccttggcacagccgtgattttgtgttgctgctgccactgcagtaggataatcagtgcggaatctggaggaagttcaaaccatcactgacgatccactctgcagatttccattgaggttattgaagctattgtagagtgattcaaaaagccattgaagtagcaagggaggaaggagttgctctctgtgcacatgaaaccctgaccttcatggcctagaattgaaaatgtctctcaagagcttgctaaatgaatggaacttaaaaacagaatatcaagctcgtagtcagatctgaaaaagaagcttcagagggcaatgctttgcccattatttatatgtaagtttctcaacctaagccaggctttcttcactataaaatgcctgggataatctgtaaatactttgtgtatttttctttgatttataaaatgtaatagagtattttttttattaacagctttgcttatatagtagaagagaattgtctcatccatctaagtttaatcacattcactaaagccatagaaatgtcagagttagatgaatttcaaaacgaaagaagaatctaggttactttatgggtatggttaatgatattcattttaacacagagagagggaaggaattacccacattctatagggaagcaactctgggggcaggggcagtggtattggaaggacaggtaccaggacaggctgggcctgctgcctgatcctacctggaccttgaggggctatctcatgctgaccagagcagaatctcagggtctgcgctgtcagaccccagcagtgaagctgcccccacactttccctagatgccaaatctgtttgtgctttcattgattattatcacttctactattatcattctcattgctcccaaattacattagctagaagcaattcagttcacataaaacatacagataatgaaagttttaataacaatatcactctgtttccagaaagacctaatatttgctgttgtggtggcaaataccttgcccagagctcccagatagtctgccacctcccccgtcctccctccagggcatgtacagtaaagttggatgattgaagtgttccagatgactcggctttgggcactcaaactgctttgtccccagcacctggtttattcctcctcctctcttccacaccttgttttccttctttgaaggaatggagggacgcttcagcagaaggagtaggaaaggatgcaatggtggttggttgtaataaacaggagcctgggttgccaaaggggctgagcctcacaggggctgtgctggagtggttactgcaagcttagtatgtgtctgtgctcctcgaggcagaggagccctgtttataagcctggttcataatttgctgatctgtcgtaggaagtaaatggcccagggttatcagccttgttcatttgtgcagaacattatgcatcctcctgttggttcaatccatcccagagtctaaattacaggtcataaagcagcttctgcacgcaggattagaatgagaacaaaggagttagagaatattgtgtggaaaaattgcaaaacacagaaagtatgtagaaaaaaaaatcactcctaggtcagctctccttctagtctgtcttgtttctgggtatgagatttattttttttacaaagtcatggtcacatgttggtgttttggaaggtagtgcaagaaaccacccttctcacctggggacctcatttgataaccagcattggctaatctgagcttgattcctccagacagggttggtgacagagtaacacactccagtctctgaccctctgtttctagactccagtactcactcattcatgcattctttttttcaacaaatatttaatgtcctcctgccatgcaagctctttcttggccccaaaagatgggaagagcacaggggactgaccctcagagtttattgcacagagaaggcaggtggtagctggatgctggaggagtgtagacagccattttctggccaccttgtctttgtatgtcacagccattttctgaaggaaatgaactgaaagagactgtcgtccttttttaatgacacagttcagatatattcaaattcatttgggttagaatacaagctgtggggggttttattggcatcatgctaaaaatatattcctgtctcttgaatttttaaaatttcattttattgtgatatgaacacataacatgagattgaccctcttaaattttaaaatgtacaatgcagtattgttgtctataggtacagtgttatagagcagatctctagaacgtactcttcttaacataactgaaactttataaacattgatgaatagcccccaatttccctctcccccgcccagctcctcatgaccacctttccgctcttcaattgtatgaatttgactattttagatttcacatagaaatgtgatcatgtaatacttgtccttctgtgactagctgatttcacttagcataatgtcctcaaggttcattcatgttgctgcaagtacagaattcccttcctttttaaggctgaataatattccactgtaggtatacactgcatttgctttatccatttgtttgtccaaacacatttaggctgtttccgcatcttggctgttgtgaatagtgcctcagtgaacagggggtgttaatatctctgagattccgatttcagttattttgggtatatacccacatatgtcttgaattcttaaagaaaaccaactttgctcacattggcatttctttttgtcttgcccttcccttcacagtcccttctgagcaagtgtcatcaacactgtaacctctgtttccctgcctctttcctctgctcctcaaccatgtgtgtcttaaccttgcatgtcacccagtacaaagcgacctctcctcatttcccctcgtgcaagacacatcacagattcccacctgtttcctggagttcttgcttcccttgacttcttgggccacagcaatcagccacctacccatctgatgagcagccctgacttgacacttcagcattcataattccatttgtcaatgccacctccagcacagttctctttccttctcagtactccatctacccagatactcaagccagaaacctcagcattattacagatatctttatatgaacaatcctgagtggcctaaaaatgatagtaaaatcacctcgtaatcctaccactttaaaagtgacataaaaagggacttgctgttctgaccaagatggaataaacaccaccccatctctcccactgatacgtcataaaaccctaaactgaatgcataaagtgagtatcaggggactctgaaaggtaggtaagaggaggagctggtagcctgaggagatagatcaggacctgagtgttgactccatagcaagtgtgagcagtgaagtaacacctctgcgctctgccactggtggtatcaacaacccctgcaggccagagctcctgggactttcctagcccagatcctactgcacccccccaccaccagcccctatgggacagagcttgttggacagccttggccctactccaagtgaacaccagcaactaagcagcaaatccctcttggcggcagcatccctgcaggatggagttctttctattctctcatccctatgccaggcaaatgccaacaacaagctgaaactacttgccctggtggcagtggcagtaatgtcccttgtgaggcacaactcttgattctttcagtcctaatctttggtcatcagtgaagtggccaacccctcacccctgctgaagatggtagcagtaccctctgcagggcaacggtcctttagcccttccagccctgctccaagtatgcaccagcctagagcactccaagtgagtacctgcctctccccacagcagctcctatgggtcagagctcttttgactctttagacattacccccagagaaacccaaaaatgaagctatacccccgtattagcacagacagcagcaacaggtatggtggttgggggtcctgcaggctcctttcccttgccactctgtcctgaggtggtcccagtcacaagaaggtgctacagtgcagagaggctaaaccttggctttctagccatagaaccttgaggagtggagattacagaaaggagacatctgagttagatatcctttaaatgtgtgtatgaagttctgggctcatccctgagctgcacatgcataaaactgactagaatgagcacagcaaaaccttttgagaattttagaaggaccaagtctcagcataatattcaaaatctgtaggatatgaaccaaaattatccaacatacaaagaaccaggaaagcctaaaaaattctcgaggaaaaaggcaatcaacaaatgccaaccctgagaggattcaaatgttagaattattagacaaagactttaaagcaactattatgccacattctaagaagtaaaaatgagtactcttggaattaatggaaagatagaaattctctgtaaaaaaaaaatagaagctataaagatagaaattttagagttggaaaagctggagtggctatatattcatataacacaaagaagacttcagaaaaaggacaattattagtgataaaatggaacattatataatgataatttcagtaatattggtgaatcaagaatgcataagagtactaaatgtgtgtgtccctaacaacagagcttcaaaatacatgaagcaaaaacttggtagtactgaaaggaaaaataaataaatccatagtaagatgtagagactttagcactcctctgtcagtagtcaagaaaagtagcaggtagaaaatcagaaaggatatttcaattaggtcaagttggttgaacatcatcatcaaccaacttgacctaattgatatttatagaacagcccaccagccacagcagaatacatgttcttttcaagtgcacatgggacattcatgaagatagaccatattctaggtcactaaacagcccttattaaattcgaaagaattgaaattattcaaagcttgttctctgcccttaatgaattaaataagagtttgataacatctgaaaaatatctggaaagaaatatgaaaaagatcatcaaatatttgaaattaaacactacaccactatataatccatggatcaaagaggatgtctcaagggaaattagaacactggattaaaatgaaaatacaacatatcaaaatttgtggaatgcagataaactggtacttagggaaactcaacattaaattatattagaaagaaaaaatgtttcaaagcagtaatttaagcttccactttaaggaactagaaaaagaaaagcaaactaaactcaaagcaagaaggaaagaaataataaacataagagcaaacataaatgaaaatataaaaataatagaaaaaaaattgatgaaaccaaaagatggttcttcaaaatagccaataaagttgatttaaaaactgaggggaaaaaagacacaaattacaaacattatggagtgccactactgactccataggcattaaaatgataataagggaatactatgaacaattctacgcacataaatttgacaaatgagaagaaaagggccaattccttgaaagacacaaactatcaaacttaaaaaatagcatgaatggtcctgtatctgttaaagtgatcaaatctgtaggtaaaaaccttccagaaaactccattttcacgtggtttgactggtgatttctaccaagcatttaaagaagaaataacaccaattatacaaaatctcagcaaaactaaggggaaacacttcccaacccgttttatgaggccagcatgattgtaatactggaattaaagacaatacagaaaactatagactctctgtatactatactaaattcagagatactatattttctcatatttttttctaaaatttttatagttttcattttacatttaagtccatgacaccttttgagttcattttgtatatgatgtgagacttaggtcaaggttcatacttttgcctatgaatgttcctatgcttcaggaccatttggttgtgatgtacaatttagtatactatagtatctctgaatttagatgcaaaatttttttttaagacagagtcttgctcttgttgcccaagctggagtgcaatggctcaatcttggctcactgcaacctccatctgccaggttcaagcaattctcctgcctcagcctcccaagtagctaggattacaggcacccaccaccacacctgaccaattttttgtatttttagtgaagacagggtttcaccatgttggtcaagctggtctcaaactcctgacctcaggtgatccacctgcctcagcctcccaaagtgctgggattacaggcatgagccactgtgcctgccctagatgcaaaattcttaacaaaatattatcaaattgtacatcacaaccaaatggtcctgaagcataggaatattcataggcaaaagtatgaaccttgacctaagtcttacatcatatacaaaattaactcaaaaggggtcatggacttaaatgtaaaatgaaaactataaaacttttagaaaaaaatatgagaaaatatttgggatatagggctaggcaaagacatcttagacttgtcatcaaagcatccaaagtggaaaatttgatgaattggacattattaaaattaataccttttgctttgcaaaagacctatttaagagcctgaaaagacaaactacaaactgcaagaaaagataggcaaactacatatcctataaaggaccagtatttagaatatataaagtattctttaaagtcaatagtaaaaaaaaaaacaaaaaaacagcaaaccaattagaaaacgggcaaaagacatgaacagacatttcaccagagaaagtgtacagatggcaaataagcacctgaaaatatgcttaccatcattagccattagggaaacacaaaaccataatgagataccattacgtaactattaaaatgaccaaaacaaaaaatattaataataccattgtgcttgtgaggatgtggagaaaatgcaattctcattagagtattatctctatggccaatgggaatgcaaatggcacagtcactttggaaaacagtttggcaatttcttataaaattaaaaatatgcttatgacccagcaattccactttaggtatttatcctagataaatggaaatgtacattcccacaaaagtcatacgttcatgtctacaacagcattattcaaaatcaccaaaaaccagccaggtgcggtggctcacgcctgtaatcccagcactttgggaggccaaggtgggtggatcacttgagtccaggagttcaagaccagcatggccaacatggtgaaaccccatgtatactaaaaataaaaaattaactgagtgcggtggtgcacacctgtagtcccagcaacttgggaggctgaggcaggagaatcgcttgaacccaggaggtggaggttgcagtgagcagagattgtgccactgcaactccagcctgggtgacagagcaacactgtctcaaaagtaaaaatacaaatgacataatcacccaaaactggaaacaacccacatgtaactcagctggtgaatgggaaacaaactgtggtacatccatatgattaaaaactacttagccatcaaaaggaatggaccctcaatatacacagtaaccttaattgtgcatgctcagtgaataaagccagtctttcaaaattgcaaactgaattattccatttctatgacatttggaagaggcaaaaatatatggacagagaacaaatagatcagtagttgccaggggttgggagtaggaggagagtctggttacataggggaaggaagaaggaattcttcagggtgttgatattctgtatcctgtttgtgacggttgttataagaagctaaacgtgttaaaattcagaactgtacaaccaaagggtgaattttactatctataaatgtaagaataattttctttttttttttttttttttttttgagacagagtctcgctctgtcaccaggctggagtgctggagtgcagtggcatgatcttggctcgctgcagcctccgcctcccagattcaagcaattctcctgcctcagcctcccgagtagctgggactacaggcacaccaccatgcctagctaatttttttgtatttttaggagagacagggtttcaccatgttggccaggatggtctctatctcctgacctcgtgatccgcccacctcagcctcccaaagtgctgggattgcaggcatgagccaccatgcccggccagaataattttcaaatacaaaaaaaaagggatagtggcctcctgcccacccctttctgaacctctttaatcccactccccagggggaaccgcaccaccagattcatcgtgtttcccttgaacactgcagtcataaccacaacaagatgggcatgcatatctaggcacgtggatccttttattttaatcacaaaaatgctgtacatcttggcttgcactttcactccacagtaaagcatgggcatcttttttttttttttaaatcagagtgaactgcctcgcgtctttctttttaagggttacactgtatgtgttctgtgttttatttaactgttcccctcctgaggggcattccgcttgtttgagcttttctccctcttgctgacagtgctgcagtaatcattcttgtccattttaatccctatgtatttacacggttgtttctctatgatagattcctaaaagtggattttcaggttctcagatcatgtgcacttttaatagacaactttaaattaccctccataaaggttgtgctggtttacacttcttccagcagaatagagactatttctccaccccctcatcaacactaagtgtcgtcagtgttttttttcctccagtctgatggatgaaaaatgccagttgtgatgttcaccttggtcagcaagttctggtcatcctaatgtgcagcgtctttatcctcccacgtccccatgccagcctcatctttaacctgacacctacagtacctcctccctccaactctcttcttaccctttcttcccaggtcgtgggtggaaccatggagctttcctctttaaaaattcgcattgccttcccattatatttagaataaaattcagactcctagagaaggcatttaaggctttttagattctggccaaaacaaacatttctgcctctctaagtttgtctgccatttcactccctccaacatctcctgcagccccgcccctgataccagctccctggcactctgtacacacccctgcccatattgagcgtacttcactcgacccctgaactagatcctgagcccttgagaacttccagggtttttcttcctctgttgagcacccatacccatgccctggggttcctagcctgcagtgggtgatccttggaccaggctgtgtctgcatgaccaggtgctgggatgagggagggagcaaggcaggggctgggtggtaagactgaagagtgtggatctgtggggtttactctgaggagcacctcttaggggctgtgggattctgagcaagttgagtcttgtaaactctgagtcttaatttcctcctttatataatgaggttatttgtaataacagcaaatagggcagcaaagacattttaactgcaaaatgtgatacagtttcatagagtacagtcatactttcctaaacatgtactaaaatattctcatctcagctgcacagaatgctgtatgagaatgggattctccttgtcccagttttggttaaggcaccaatgcagagatgtaagataccagagagcatgtttgcaggatctgtggagtcaacaaccactcaccacccccaccctcagaatatacggacggtggggaggaataaagcggatttgcaaaacactttctgtggagagcacactgcagtcctgtgagccaccagcgcagaggaaacttccctcatgcagagtctgcaagggtggcttccatgggacttcttagaagctgaacagatgtgccctgcagttgggagacatgaaggactgctgctggactcagaccacctgtgggcatggggcagacaggaccaccacatgacccacttgtgctcccagagccccacatggggagccagccaagaggacaaggggacaatgagaagcggtcacaaccagagtcccagtggtggctgggaatcccccagtgtcagtttcaagtgtctgccaggcccaggcaggacaaaaccttgtaaggctccaaagagtcctgctgatctccctactctccttcttccccagctctcagccctcgggaaaggagtctccgccccaactcagacaccctgcattcaggagtcatagcctcacttcgcccagaggctacacattttaattactgaattaaaactgattataacaaaagtgaccatggtgactgctgggacctgagaaggactgagaaggtgctggaagtcttacagtttctacctgggatgggggaccatgggagaccaggatcgggcagtgcttttatgtctctagaacctgcaggtgcagtgctctggttcctgcacaggtgcagcccacctcccaggagcagataagcagtgccgcccatcccctgcagctgcactggtgccatttcagagggctggcttcagtactttctccacggcagccattaaccttatgtggggggcgctgagaccctctgtgcactcaccccagggctcaggagagaaataggtttgaagaagagaagacagtatctttatgacaagtaggaagtgtcccaggcccctctgagcagggccaagggtatggcaggaggtgaggtctgaggtggcaacagtgtggacccatagcatgggcagccctgggggtagatgtcctggggaccaggggcactggctggttaaaagaagcatctaccagagcctgggggcagggggcagatgtcagcccagttctcaagaactgggtcatctggtcagctgggcactgttgtccccagaaaggggacaacatactgtgagctctctcttcagggtttctttgggcagaagctcagagcagcatcaagatcagtggttggcaaagctggctgcaacttgcggtcacctgggagtccacccccacagatttggtggacctgcccaggatgaatcccagactgtgagagtgttaaaggctgcccaggtggttctaatgtgtggccaatgttgagatactgggctctaggacagcggcgcttctcaaacttaggagtgcttatgaatctgcttaaggtgatgcttcccacccagtacgtctggaataatggcagcagtgctggtccgtggacgacacttggagtggtgaggctccaggtctgcgctctctaacacagagccagtagctgcacgtggctgtttaaatgtaaatgtaagcgaaattaaaatgcagttcctcagtcacagcagccacatttcaagagctcaggagccacgtatgactggttgacagcacagagggcatttccatcattatacaaagttttactgggcagcactgtttcagggctgtcactagcaaatagcatcttgctgagactctgtaagggttgtgctcttcccaaaaatggcttgggtgtcaaggcaccataatacttcacctttctgcctgtatgcctgcccccctctatcagcttcttgaagtcagggtctgcagcagatttaccctctcagtaaatgggtaaataataacaacaatagctaacatatagtgagcacttactaagtgccaagtattaacgttaaatgctttatgcgttaattttcaacaacaattctatttagtaaataagaaaagaaacttaggttaaagaacttgcacaaaggcatgtagctagtaaactgtggaggagaggtggaggccacatagactcactgcagcccacgctccacagtgtcatgctgcactgcagttctcagctggggcaggcatgggccccagcagacattggcagtgcctggagacatatttgattgacaccgctgtggtagggtggggaagggaggtataccagcatctagcaggtagagacgctgagcatcctacagtgcacaggacagctccccacaacaaagacctatccagcccaaaatgtcagcagtgccaaggctgagtaactgttgtttgccactcaatgaataagttaaaatggggaggaagtggttttataggacagtcatgaggtcatacctcttagtaagagatggtatgtgatgtagtgaatgaaaattagagatcaagaggtctgtgttcaaatcccagctttgttacatattggccaaggaccctggacaagtcactttgttccataagactctgtggtcccatatccaaaatggggattgaaaatatccttacgttgcaaggagggctgtgagggtcattatgaatatgatactgctctgaagacaaagatggaataaaccttagctgtgaacatttctttggtcgggagaaacttccctacctgactagtgctgagtgaaggagggcccagatgtaatagagaaagggaaatctgagctccaaggacaatagctgcccctggaatggattacttactcttctgttggccaccctagacagttcttgtagaattccagcagttcctggagatctgagatggggagacaaggaatctaaggtgaggtgtttgtgtacatttcaaagtgtaagtagaataatttttcacctttttctcaatcgtgctctagctcaaagttatttttaaataacagtgcctttccctccccatatccttgtgaggtcacagttatatcagctggttgggagcggagaccagctgtctctgtggaggtagagtggtcattgcctcctgccgagaggctagctttaattgcacaggcagcggcagtttagcaagtgtgctttcagtccagctcctccactgacaactctgtgccgttgagcccggccctggctccccgggatctccactatgagatgtggaggttggaccaggccaccctgggatgtctgccaaccttgacatgccaagtgctgggcagctgtcccagaagtcaggaaaagagcctggtaaggcatctgccccttggggtgcccccaatacacatggctggccagattcctggcctcactccacacacccaaacacagatgtgactcaacgattgttttttctttatgaatgccttctcacagatgttacctgtgagcaatagatccccaaagcaggtatagttggggccctgacaacaaccaaagcagaccccagggccccatttgggaaaaactcacatcagtttctactatggggacctgagcaaactcctgccctgggacaaggactgacactcaccccaccccatgatggatatactaccatatgaggccctcgtaaataaatgctgccactgggagactctctgtctccctcagccttttcaccggggaagacggcccctctgggccctcactccctcgccttttaatgatagaagcgtgctaccagggctgttaaagcagcagtggcttttgtctttctgccatgtggagttgaagcttgtgtgaaaagagatatgtggcccagcgggaggcgggtttctgagcatcagttgggaaattcaaaccacagaaagcctggcctgggaaagcaggagagccggctgaggagcccttggcagtgcctcctgacctgggagtcaggtaagggatgagggcagtttggccctggcagccccatgctggtggctgggaaagaagcttccagaaacagtgtccttctgtttgcccctaggctgcaaagtgagtctgtgtggagtcagatcctctgcactcgctgagttgtgcaattccacttaggagaggaagtggagcaagaggaggggaggctctggagggtggaggaggagggagattgtgtggatgaggggaggcagtggttagaaaaggcaaagggggtgaggccctacggagggtgcacttgaagctgtggggtagtgaagcggtggaaagggtctgctggtgagggcatccggggcaccttgcttaattgcagtgtggaaacagctctgggtgcaaacttgcctcatttctctatgtgcacagggagctaggctcttcttcctggtcactctcaagcacctagtgactcctgtcttagggggggttttgttatttgtgtgcttttacttctaattgaagaataatatgcatacagagaaatgcacagatcctatgtgtgtagctcagtgcatttccagactgaatacaccagaccaagaaacagaatgagaccagcaccccagaggccctgccgtgtcccctttcagcaggctctggaactcattcctgattgtggaccatggtggctgtcagaagatcctctggtcctgatggcttttgcaggagagcctgtctccatgcactggagagaaagattcaaaaaaatcattcctgtctagactcagcaccttccccagggcctggcacctagtgggcacccaccaggtccagtccgttctcattgtctaaggaagttatgctctgagaagtcactgcaagctaacttagcaagtactgagccactgctcctggaggaaatgcaaggttagcttcctgtgtgtctcctgccacagcatcaatagatcaacacataaccttgttttaggtgtaattctgtttaaagatgctttatttagtatatattgttgacgcattgacaccgaacacacagccaacggcactgtaactcaggcctgaatgaagcttatctgaaacacacattatctccatcgggcacatcacagcctccttgggcttaggaacattagacagcacatcagcactccacttggcagcctaaccagcagaatcaccaagaaaacctagtgccccaaaatgtggcactgagtagactacaaaaaagatactgtatacggtgtaagagctaaaacaataaggcggcgcatcactgcttgacctcagctgggaacttgcacattgggaaactcaaatgttttgctgccctgcacgtgtttgcaaatgaccatgccaacaccatgcatattgattttgggattacaaatgtattttagcgagtaggcgaattctcaaatatggagtcagctcacagcgatgattgactctatttgttgaatgaggagaggaaggaatggcggtaagcttaatttaaggtggaactgggacacagcaccgtctcctgtcattagcagtgggggcctgccctgaaaagctcttgctcagtctcaaaatgctcagcatggttttgagaagaagacttggttgagcattaccaccctgagttccacagtgagatcacacagcctggctctgggacagatctgatgacgagcgactgtagacgttgccagcatgtattgatcaggagcagcctgtgagtcaagactgacaacagatcaataaatggcttttaaaaagcaaaacccctcaagctgtttatctaggaagcctgacaaaccctgccgcagtggtgtggccccatgtgtccccagggcctggggcccacctctgccccagaagtcctcttagtgtctgtagacaggtcccatttccaccaggtcaaccagggctgtggcagtggacctggatggcaggcagagcagaggaccgctgttctatttgttgaagcaacgaggcacagtgactgttctagcacagctggctgtgagaaatggcgatgatggatccactttagatccgaagtcttagcaaactcaggcctcttttccacagagaatgttgtgaagacctgggaatgagctgttgatgtgcatttttaggatgacagcataatggagaaaattggaagtagcatatgccaaagtatgaagtgttcacacagctcccttgggttgttgatttatgggaagcttttttctcctttatacttttatctactttctaaatctgtacaatatgcttgtgtacttctatgaacaagaaagaaatgttatgaaaagaaaaagtttcttaaaaattgctgcatcaggccgggtgcagtggctcccacccataatcccagcactttgggaggcagaggtgagaagatcattggagaccagcctgggtgacatagcgagaccccatctctacaaaaattaatttagaaaaaaattagctagtcatggccgggcacagtggctcatgcctgtaatcccagcactttgggaggctgaggcgggtggatcacgaggtcaagagatcgagaccatcctggctaacatggtgaaaccccgtctctactaaaaaatacaaaaaattagctgagcgtggtggtgcatgcctgtagtcccagctactcgggaggctgaggcaagggaatcccttgaacccaggaggcggagcttgcagtgagcctagattgcgccactgcactccagcctgggcaacagagcgagactccatctcaaaaaaaaaaaaaaaaaaagccaggcatgtggctcacacccataattccagctactcaggaggctgaaaaagttgctacttcagaaaggacaccatgtaccaaatttttcagaggcctggaaatcttgttgccttaccttaaggcagagcctgtgctttatatcctcagccaaaaggcaagcaacctgggaatttacattgtacgacaactcgttgcctctcaggagactgtgcttgacagccctcagcttccagacttaacagctgcatccctagtgtcatacggggtgtggcccaccattggggtcccaccctgggcccctcaactcgtcatagcagaagtccttctgaaagaaaaaaacaataccttaaggctgaattttaataggcactaaaagaactaaccatcacctatcagaaagtcaaaatgaagtgatgagacgaatctgtcccacgtaggcgtagttgaacacctctagaaatggtttaacattgaggatttttgaaagggttcattttagatcttcccgaatacaaatagctcagtaataatgccaaatgtgggtctgaaaactttgtcatcctctcctacaggagagttctgtgtggaggtattttaagagtgattcctgggaatgcagatgaaaacggctctcatctcgggcagtgtgtcctgcatccgggatggccaggctcgctgtaacacacagcgtgtgcatggaggagagagcgccgccgtggatagcgggactgcggtgcacactggtgtggcttgggccaggctcctccatgatgcagcgccagcagggcagccccgatcagacccgctggctctcacacactgtggcagacgtgaccaggatgaggcgcctgcccttacagggcttgcaggcagactggcacacacagcattgagatggtctgctggaacccgtggacgatgttctcagggagccaagagtcagcctggctgcctgaccctgcaagaggctggggtgcaacccattgcttgctgtggttttcttatcacaacagccacgagggctcgttgtcatggcagaatggctctctggtctccatcaagctccagggtaaggtttgaccaaaattctccacccctcctccagcaggaacaataacaacactagcaacaagcacataacaacagcagcaattgtggcagcaactaacaccactaagggctttccctggattctctcacagaatcttcacaaccacgctgggaagtgtagacagtggatatttcacctgatcttcaccaaccacgctgagaggtatagacagtggatatttcacccaatcttcacaatcacaccaagagggacagtggatatttcacttatcttcaaaaccacactgagagatatagacagtggatatttcacttcacaaccacactgggaggcataggtcgtggattatgtcatggaatcttcacaccacactagcaagtgtctacacctgctacaagcatacagttcagagaggcctcctaggcccctgccacagagcagagtggctcatcacacagctgctctgcctgtgctcactggggacaaaggcacagcttctttgaggctcagcactgtggaaggtgatgctcagcccatcacccctttctcagcttatctgctgagaggctccaggtggaatctcaggcatctgtgaactacattatggagctggagtgggttctctctctttttcctggtgtctagacccccatttgccattcctgcactcctctgccaatgagggtggccctggacagtccctgtaacagggcctagagattacaagggccctcttgcattcctgacaaggaaaaaggtgagaaagaagagaatacagaataaaaggaaagaccagcagttgcagggaaagaggcaggaaccaaaaaggagagaaatggtggtgtggtcataagctggcccagtgcttggcgatgctgctattgcaggttaccttatcccacagcagcatggcctggcccagccagggcacccacccactcccgtgggtctgcatgtgaacacagacacacgcttaaaacacacacacagtacagctggaaacattcctaccccacagacaggcagcagcaggtgacccttctgtgtttgggatggaattctgccagcatgctcctgatgtaaggaaaggaaaatttacctcttgccaagctcagcatttagaagtgtatctggtacatagtctgtggtgtgtgtttgttcggtagataagaaatgcttatgaccaaaggcatacttcagttgggtagatggtcagctagcaaacatgtctagtaccaaacatagtgaggcaagtgtctcgagaggttacagaggacttaggagagagactgaccagaacagacttcatggaggaggtagtgtctagggaccctggtgaaccagcggggaggattctagaacaagatatccaagcccttgtcacctctcttgagctgtggccacagcctccctcctagcttcccagcctctcgtccctctacagtcagactgattctccacacaaccttcagagtgagcccatggtttaaaacccccacagtgtccccattatggacagaaaaagaaaaaagacagaaaagacccttccttggggccggtttacacaactcctccacctgcccccaaccccagcctggaagattgttctccagatcccaacccagaaggcacccctactcccactcaccagtgttagcccctgtgtccgcatagccctttgtaaattttagcattttccagtttctaccacagttacttgtttgtgtctcgtctccccaactagactttgagctttttgaaggaacaatttgttgtttattttcccacctcaaatataaggtcgtccttgctcatagcaaacaaggtgaaacaggagaatagaaatgctgggctctggctaggaatagaaagtagggctggagtgtacactaagaagtattagtaatttcagcaattctgcctgttggatcaggagtagaagagagaatgctgggaggaagcgatgacggctgagggtcaggagcaagcaggagttccaggttaggaacaaaagtcagacaaggacctggagaagggcctcagaggctggagggatgccccaggaggacaggctcccccagagaggatgtgcagccacgtcagagctgcaggggtgaagcaggttgaggaccaggcttgaccttgggatttggggttgggtggttgggaggatggaaggagtggtgtcaactcgtggctggttcagcaagtggctgacgagacataggcagaggccatttgagctaagggtagaggaggagggagaactggaccttcaagggacaatgaggctccggggagacttctttcaagctatggaagacccaagcattctgctaagctgcagggaagatgtcagtgggagagactgaagagtcaggaaaggggtaggatgagtccaagaggtgcagcaggattcccagggggccagtcaggtggaggccccagggagcagccagaaaaaggagtgagagccgtccctggctgccagggccaggggaggtcctggctgtgtgaggctgaaggctcttctcaccaccagcaagagactgtagcttgcaaagcagtggccaccccgcttgtacctccttgttgaccagggcactaagggaaaagaattccagcctgaactggaagcagaaacaaaggcaaagtgagtaatatcctctgcacaccagagcaaggggtggaagacatcaggccacagagaacaatgacattcactcctcctggacatctgcatgtgttgctgtgaaacagtgctgttgtcacccggctgactcaagcacactgtgtagaagggaactgaggagaggtgccaggtggttggagatcagtttcagcctttgttttatcccgtggcaggcaaacatccagaagcaggctcatggggaaccttgggttctatgcttttgatgtacctgtaagaagccacttattggccaggggaggtggctcacgcctgtaattccagcactttgggaagctgaggcaggcagattgtttgagctcaggagttcgagaccagcctgggcaacatggcaagaccccatctctacaaaaaattcactgggcgtgatggtgcatgactgtaatcccagctgctcaggaggccaaggtgggaggatcacttgagcctggtaggcggagggtgcagtgagccttgatcgcaccactgtacttcagcctgggtgtcagagtgagaccctgtctcaaaaaaaaaaagaaaagaaaagaaaagaaaagccacttatttaatccacagatttcttttttctattgatgaaggtaataaattcttatcgtagaaaatatgaaaatacagaagagctgaaatgtaagaggaggggaatgacccacaatttcaccacccaaagacaagcacagtaaatatggaaggagattccacaaaacatatggtgtcttttttttgagacagagtgtcactctttttttttttttttttttttttttttttttgagacggagtctcgctctgtcgcccaggctggagtgcagtggcgcgatctcggctcactgcaagctccgcctcccgggttcacgccattctcctgcctcagcctccagagtgtcactcttgtccaggctggagtgcaatggcgtgatctcagctcactgcaacctccacctcccaagttcaagcgattgtcctgccacagtctcccaagtaggtgggactacaggcatgtgccaccatgcccagctaatttttgtatttttagtagagacggggttttgccatgttgaccaagttggtctcgaactcctgacctcaggtgatccaccccctcttggccttccagagagttgggattacaggcatgcgccaccgcacccggccaactctatatggtttcaaaggcactatttcttttctctctagaacattaaggaaagcaactgtgaccagtttttggtgtcactgtctccagaaagggaaggttatgctcacagtttttagaagacaagagattaatagtgtgtctacagcatttgagcaggaatcagcatttggaccagtacatactggtccaaaatgacaggattatattaaagaaattttatctatttgtgtacttatttttatctccttccagaaaggattcctaggaggaagttggctttaaagtacacaccgaccctatagaagcagttgcatttaattttgtggggctcagactagaggagcataatctctctgatgcatctttaataagaaaacaaagcccctaaagaaagtaatcctctcccagacaccctgcaaccctgaaccaaagcagtagtgttctctgtgcaggagacacaaagggtgcaaccgaagagggaataggactgtttctataatcttgtgcctttacccaacagaaaagagtctgccgcctgcagcaacagggcctggagctgatgggcagcctgcgccaccctggatcaccgtcactcggcagaagcggagggggaccttggaccagccacccaaccaggaagacaagcctggggcacggaccctgaagtctgaaccaggaaagcaagccaaggtgcccgagagaggccaggtgcttagagcaaatacttctgttctgtgggtgcaggagggagcagccagctgggactggggcgaggaccctgtaaggaccacatgtgctgcatgggcgtcacagggaccgtcacctgtgatggttgtggatgtgtggtcgagagccaatgaagcaaaataaatgacttgccaaatcataacctccatggtggagcattctgcctgcctttgcatatgctgagctgttggggatgcagagaagcatgtgaatcacttaggcagtgcagacagctctctactccctgcctccttggcaacgcagcagctcagcatctagaaaaatgggaggaggttaaaataacttcgagttagacacacagcaatgatgtcgacagctccatcccagcttatcatgctgtgaggagcgagccctgctctttgctgctccaccggccacatgctggagctcctcattcctcacctggggctgcggggctggaacttgtggttccattttgtactctgaattgaaggcagctttcaccaacccaaacaactatgcctagaatcaggccgagactcgcaatttttgtatcccccaatagcaccgtgatgaatctgtgtgtttcagccatgtggggaagagagcctgagcctgcattaggacctgcttcccctcgttttaaccagaacctcaattataccagacttgaagaccctcatgtaggcgtggggaatttagaaaacaaatagtaaccagtttgggacatctataactattccaactgtcataaaaatcacaaaatgatttctaaacaaatcttgactttcaaatggaatccctgccatctggcactgaggccaggtgtggggacaggaaggaagccatgatgcacgtgtgtgccaggataaggccgcatactggtcccagcgccagcatctgaccactcggtgttagtgagctgacaccagggcgccctcccgagaaagtgccagcagtgcaggcatcttggatgagcagctttgcagctccttcactttggatgtgtttgcccctgtctgaatcattgttaacttggcagcatgtgtcttatgtcccaacaggagcctgtgaagcaagctgactttgttcgcagcaagtctttcctgataacccctgtgaagcccgctgtggaccggaagcagggggcaaagctcaacttcaaggaggggctgcaaagaggaatctcattgtcccatcagaacttgggtatgaaatctgcaaacattaccacatactttgaaatcattttcctgggtcgttcctgcagtttgagttttggtttggtttggtttttgcaaattacttgcaacattgagttttctacacagctcttacggagatacaatttacgtgtcataaaactcatccattttagtgtacagttcattaagtataaggttgacccttgaacaacacgggtttgaactgcacaggtctacttaaatgctgacttttttccaaccaaacccagatggaaaattacctgtatcctatcctcaggatgtgaaatctgagaaaacagagggccgtctttttttatgtgcgggttccacgggctgactgcagtacttgagtattcatagattttggtatatgcaggtgggagaggtcctagaaccagctccctgcatacaccaggggacaactgtatattgacagtgagcatgtatgtatttacagagttgcacaactgtgatgaaaatctaattttacaatatttccctcacactaaagagaaacctcatgcccatttacagtcacttcccactcccactcctagctctaggcaaccactaatctactctgtctctatagatttgcctttttgggacatttctaatgaatagaatcctaacgtatgtacccttttatatctggcgtctttcactgagcatagcatcttcaagatatgcctttgttgttgcatgtatcagtatttaaaaatttttaggccggacgccatggcttacgcttgtaatcccagcactttgggaggccgagtcgggcagatcacctgaggtcaggagttcgagaccagcctggccaacatggcaaaaccccgtctctactaaaaatacaaaaattcgacaggcatggtggcgcatgtctgtaatcccagctatttgggaggctgaggcaggagaatcgcttgaacccgggaggcagagattgcagggagctgagattgtaccactgcactccagcctgggcaacacagtgagacttctgtctcaaaaaaaaaaaaaaaaaaaaaatatatatatatatatatatatatatatatataaatttttatatatttttaattatggtaagggcacataacagaatttaccatcttagccatttttaagtgcacagttcagttcagtagttttaagtgagggacattgctgcagcccatctgtagagctcctgccattttatttccaaagtctctctcacctcattgcattgccagaattgtttgagcttgctcataagtctttttatcacataaatgacatattctaggcccaaatcttccttacatgttgacatattattgaattttatgttcgagaacacagttaagacctcgatgtctagttcgagaaacacaagaggcttaagggaaaattcgaagtcactgctcatgtttctgttggttttgtctcccttccaagcagctcagtctgcagtgatgatggagaaggaactgcatcagctgaagagagccagttatgccagtacagatcagccatcctggatggaacttgccagaaagaaatctcaagcttggagtgacatgccccagattataaaataggtgggcagtgtgctgataaagcatgtccactaccctgacaagccacttagttaaaaactgccagtgtattgtggcaaacaaactgtgaaacttaaagattgattttatcatcaagttatgacgaacttggggaagaggaaggaaccaggcaaaacaaagaggataaacacacagccatactcctgggccagagggcccagaaacaagaacaacattgaaaaagtccaggaaccagttcctgtgcccaaaggtacgaatgtgtcttttcgaattcccttgataaagaagcctcagacaaggaagaaaatagaaatgaaattggacacataaataggacacccagcaaaggccagaagagaagcccttctaggagaagggacatctgtgcttccagctgagatcagcccatgtctctggtcgctctcttgcctgtggatcctgtcttctttcatgtttactacgaggcatgacattcatggcaaaacagggatgccgtttccaagagcagctataaaacaatctgttttcctaaagacagccactctgagaaggagatgaaggaacacggcagggttcatcaattcatagactgtttccaaaaataatttttaaacttttccactaggcatctgtgtctttaaccactgcacaatgcattgcctgtttaataaaaggtttcaaacatgcctctgttctaagtgtaaatgttatttctactcagatttagagaacatcctccagcactgagttaaatgcaatgaatagggttttgcttcatacatgcctcatttaaaattctgaattgggttaattgtggagtttgagtttttgaggttttttttttccccagtgagaattttggaagacagacggtaatgtagggttttaactcttttcatctatttagtacgacatactaaatatataaaatttccttagaagttatcattctttagcatctaatcaatcgaacctgcatatttctgttgaaagctgggttaccagtgcatcagccagtatgacccatgaatgtggaatgtggaaaaaccaggcagaaggaaaacatatttgaaatctcggaattgtcttggttacataatgcctctttactgtttaaaatagttccaatttgttccttcgagcaaggtaatctccatgggagtacatgtagctgggggcatttagccatcagaatcactacaacttcatgatatactataatttgattttatataccctagggccttgctacttttattgtattttccatcttcatgaatattgtttttctagctgttagtactacacagattgattgagcctacctttattgagaaagtcctgggtcagtttttttcccaaccgagttgatttactaattgcattctcttagagaacgtcaataccgaattccatggtgaatatgctgtaacacaagagctccgtccatctagccttgcttccaaagccgaggcgtctgtgaactgttttaactggcaaaaattgtgttggctattactaccctcaaacccccatttctccctagcagatgatcagatgaaccattttgagacagcagatttcactgcaagatcaaaagtatttggtttggttttgttcaagcagatgctgatattctctgtgtatttgaggacttggtttaattctctctgacgcctggtgagttagaagggtgccatttttaggacactgggagaattcactagggtgtggccctgcagttgccactttcagcatggaggtggtgacccttctgtcgtaaccagctgagacgttggccgaaatttggggatgtcggaagtccagagtggcagcagagatggtaaaagcctgcaaggaattaccagccctggttttcctaagaagaaagacgggggagcaattactgagccagccactgctctatatttcatatgtaatttagaatcctctgcacagtcctttgagggtaagtactttatgtccactttgcaggtgaggaaactgaggcacattgaggttaagatcccacagcaggtatgcacctggaaagtgactccaaggcccatgcttttaaacactaccttcgagtaacatccttatttttatattttatttattttattgacagggtctcgctctgcccccaggctggagtgcagtggagcaatctcagctcactgcagccttgagctcctgagctcaagcagtcctcccacctcagccttccaagtagctgagacaacagatgtgcaccacacctggctaatcttttttttttgtagagatggggtctcactatgtcgcctaggctagtcttgaactcctgggctcaagcgatcctcctgcctcagcctcccagagtgtgggattacaggcatgagccactccacccagccaacatccccatttttaaaaagcattggtgcagcgaatcacttgaggataggagttcaagaccagcctggccaacatggtgaaaccccatctctactaaaaatacaaaaaaattagctgggtatggtggcaggtgcctgtaatcccagctactcaggaggctgaagcaggagaattgcttgaactcgggaggcagaggttgcagtgagtcgagatcacaccactgcactccagcctgggcaacagagtggcactccatctcagaaaaaaaaaaaatttttttaataaaaagcactggtgcagtggtgaatctgtggtctccaagacaacccagacatgagagcactgaatgtgactttgggggttcctatgtcctagggacacctcatcctttaattccttagacaaactggaaaaagggagggggaggcatttataatttttaatcgtgagcacctgcctcaactatgtggtattttcattcattccttcacctcattcaggtgacgctttagtgcctgcatcctatgagggcctagggacagctgatgaacaaacaagtaacaggctaaccttgtgccacacctgtcttatttgggtatggggagggggacaataaataaatataaaacataccaaaaaaccccaagtaaaaatagtaataagttcaatgacgagtctaaaacagaaggtcttgatcatggtggaaggactacgtgagattgggtgattagtgaaaggtttgctggaagtgatctaattataaaaatgatcatggtagcctagtctaaggtaatgctagaggtggagagaagtagatggattcaaaccacaatttaaaggtagcgtcaggccgggtgcggtggctcatgcctgtaatcccagcactttgggaggctgcggcaggtggatcacctgaggtcaggagttccagaccagcctggtcaacatggtaaaaccctgcctctactaaaaatacaaaaaaaaaaaaaaaaattagccaggtgtgatggtgcatgcctctaatcccagctactaggaaggctgaggcaagagaatcatttgaacctgggaggcagaggttgcagtgagctaagatcacaccgctgcactccagcctgggcaacagaatgagactccatctcaaaaataataaagtagagttagcatcaaatccaacatgcaggtgggtttggtatgtttggtatgagaaggaaaggatggaggtagagacgacacctagatttttggttggagcttctaggtgagtcgtggtaacacagaaatgggcgtggagggtgagattcacagaaaggagttgagtttggacatcttaaatctgagattcccattagacatctaagtggaaatatcaagttatacaattgtaggtaatcagcatttggatagaatgggaattcaggggtctagacaaaggagaacagggtgggaggattgatcctaggacactcctgtactagggatctagagttgtcaaaagggtctgtgaaggaagagggacagcaagagcgaggcaagaaaaagtgttggaaagaagagggaagaatcagctgtgtcaagagggacctgctgagagtgggatccgctgagtgggatccgctgagagtgggatccgctgagattgggacccactgagagtgggatctgctgagagtgggacccgctgtgagtgggacctgctgagagtgggacctgctgagagtgggattggctgagagtggcatctgctgagagtggcatctgctgagagtgggatctgctgctgagagtgggatctgctgagagtgcgatctgctgagagatccaaccagatgagaacaagagcagccattggcttgggaacacaaaagccataggtggcttgacaagggccctctctgtggaaaagtgggggtggaggcacaggtagattaggtcaaagctggccagcctgtagctacatcagctataaccaacttccatgaaattttactcatacatgaataggagcagaagaaatggcagtagctgggggcaagagaaagttttcctattcatttgatacaagaggaggtttacgtatggataggaatagacttgtaggagggaagggaaaattgctgaagcaggtctttctgaagcacacctcgccgtccagagattcagacaaggatgaagcacccacacctgcaggctgcttttgttgttcctggaaataggagccccacgttttgatccagctgataagggggagccactgtaacgatgacatggtcatgtgcttgccctggctaaatgtggacactggcccattttccttaccgtggcttgagtgttagtgcagagctttggtattcagggagaagggtgtgtgacgttatttgggtgtacagcgctctgacagcccatatatatgattgataccccaggagtctcctttcccctgaagagcaaggtaaaatcaacttggctgccaacagattctatgcttgagaaatccaaagctttccccctggttcctgggtcttctgtttctactgtctcctttgtacttggaacttgtgcattcttggaagttttgctctctttccccagaacttggccccttcagcagtctgcagaagaactccatacatatctgcattctgtgtcttggtcaaacccattaaataattgggactagggtcacaaggaggggatgcatcctgagggacatggccctccctagcttcctagtcccacagctccacctgcctagcaggacaaatttcccttgtttgtcttaggcacatcaggcctgccttgggctctccctcatacacgactccaagcagcttaacagagaatgtcttcagaacaaatggagtcatcccactgaggagaatgtgatgagtaaaatgttctccacctcattcaaggctatgctttgatgagtgcttaaaaccaccagcaacaggatctgtggttcttgtgattccatccatcctgagttgccacgcttctcaaaaaaaaaatccatcttataagactgacaatgcaaacggccctgaagagagtcctcctccatactccatccaggtttggataagcctgtccctgagaccatcacgatttcggactcaggtgaggctgcccacctgaggagaacccaggcttctttgtgcacacttcagagggggtgctcgtctatttcataggcagagagtcattgagaagaagaaaaaacagggagcaaatagaggtacccctgacattttaagaaaaatgcagccagtgaggtgggcactagatttgcatcactgttaaatggaaaactggggaagaaaaaaattcaaagacagcaattattatattagattctgggggaaaagacaggaaaatatttctatagaggaggtttgaaatcgaaatattttaggcatttcaaagtatgtccacaaatgctgtggcagtcctctcttcaacgtgtggagcctaattccccttcccttgagtgtgggacagacagagtgctcacttctaactgcagaacagttagcagatgggaagatatgtgctgtctgaagccaggccatgaaaggcacagctgcatttgccttgcatgttcttggaccattcactccgaaggaagtcagtccctgtatctcaaggacactcaggcagcctgtggagatgcccacacggctcgatggccagcaagctggtgctggtggctgaggcctcccaccagccaagtggatgaactgccttggaatgggccctgccagcccctgtcaagccttcagaggcctgcaacccagctgacacactgacagcagcctcacgagaaacctcagatcagactgccctgcggggctgctcccaaaccttgacccactgaaactgcatgtattattaagtcagcacgattggggataatttgttacacagcaacaggtttttcatattatttttctggatcttgaagtgaaaactccttagttgttttaaagttaacattttagctggggttaagaatataagcgtaagcacagtatgagaaaatgttatttaacacctcccgaacagcaggctgtctcaggctgtgcagcagagatagctggaggcatacctcaaacacctgtggtcccctcgcatggtatggagttgttctggaagcaaatgcccagttgggaaccgcatcgccagcctcagccccctcccacccaacacacacaactgcctaggcctgtaatcaagtcctggctcctggaatgtaggcggaagtgatatgcaccacccccacccccaatacaaatccttaacttctagagaaggttcatgtgaggacaaccaggatggcaggcgagaaagtctcctgtgggtgagacttcacagaagcgagaggcttagctcagagagacccaggggagggaggagaggttccgacagcatctgttggaaggaaagaggaagagaaaagggactcattctgtataatgccacagggaagaaaccaggaccataaatgaatgtttgagaggacaaagaaagacatgttttaactgtgagagccgttcagtgcaggacaggatgtctggtcaggagtgagctctctggcacctgagggggcaggctgccagaggacctcacccctccaggatgctatacggatcctcaccctcagaggaagtctgaactaagcggcctccccagcctggagccactctgcatcttgaactacaacaggtactatctgaggcaggggcattttatatagtgctcttcttactatttattaccaagaagtaatcattcagaaagtcctccaagtaggcttttatgtagaatgtcattgtccagaatgctttgacagctttttattaccagaaggcagccatgcagaaccagccagtcagaagacggtccttctgggccccgtacacatctgtttccccagccccacccctgagcccttcagttggttctgttgaactcctgtgtggagggaaatatttatcccttgatcgatggaaataatctgtagtgaataggtgtttttggatcaaatagcagaaataatgcaggctgaacacatgcgtgttgggtgacatttgctttctatgcattgtctagcttccttcctgccttctctgttgggaaattatccttattctcatggaaagaaaagagaggtgtgtgtgatgtccagaaggtgactagaaacagcggcggctgggctggtggttagggtgtgccccaggagtccggcctctccagagagcaccctgaaagtgtgcaggcaggccagaggcctccagacctgcagaccttatagcctgagtggccctccctgccaaacgcccagtttgacagctgctattccacttgcagaaaaactgaaattcagtattgagctcactatccagtaagaacgagttgctcctgaaagatttcccatgggaagaagaattctgccatcaaacttacgataatgcaaaattgcattatctttcaactcaatctttcaggagcagaagcctttatatttagattctccatctctcccaaggagggggcagagggattgtttccatcaccacttacccctgccgtcccacttaccatctcatctgtaaggatcaggtgcttccgccagtgcgggctgcccaggctcccctgaggcagagcaggaggcagtggttggacgcccgccataatgctgggtgtagggcagcccaccagagcctctgcctcaaattgccctgtcctgtcagagcactgtccaccagtggtgctgaaatgaggagtttacaaaggatatagggctgggcactaaactcacagtggccaagatcagagccagccttcctggcactggctagagacaggtatgtcttggatcaatggggaccctgaatgtgactacaggggacctgggtcccagcagctgccacccttacaggcaagagttccgtgcatccagtggatacctctgcactggccatagcagggtttcagagctctcttctctctatgatctcttcccatgggaggctgggcttcagagctacactataggctaaattgggtccctcaaaattcatatgtggaagtcttaaacctaatgcctcataattggctgtgtttggagacagggtctttaaagaggtaatcaaagtaaaatgaagtcactagtgtgcgccctaattcagtatgactggtgtaccaagaagaaaaggagattaagacacagacacacgctgaaggaagaccatatgaagacagaggtggccgtctacaagccaaggaaaggcctcagaaaaaatgaaccctgctgacaccttaatttttgactttcagtctctagaattatgaaaaaaaatttctcttgtttaagctgcccagtctgggatactgtgttatggcagtcctgattaacctacaagtctagtgtggtctacatttgggattgcagttgcctctctgggtctaggctaggagaggtgacctcttgggccctaccaactctgagcctttgtggtcagccacaaataaggccagcttatttttgatacttgtggcagacagctttttattaagaaaaagagtctgggtgtggtggctcatgcctgtaatcccagcactttgggaggctgaggcaggtggatcacgaggtcaggagttccagtccagcctggccaacatggtgaaacctcatctctaccaaaaatacaaaaattagccagcatggtggtgcgtgcctataatcccagctactccagaggctgaggcgtgagaatcgcttgaacctaggaagtagagattgcagtaagctgagatcgcgccactgtactccggcctgggtgacagggcgagactgtctccaaaaacaaaaaagaaagaaagaaagaaaaagaatcaccttccatttttagttctatttgctctccctagtttccaataccttcagtctctgtgcccctccctccttctcagtacattgctttgattcagtctggagaaggctgcagtcttcatttgtgaggcactcaccagccctggcaatgccgtcttttactttacacccagtcagtcgtcagcatggtggtgcacctggtacacagcaggtgtctagctaatgtctatggaatggattaataaagaaggtaatcagttacatgaatgtttccatgcagggtttcttagtgggagtagaagggcagcagagatggaaagaaggagacaggcaaaagaaaagaggaactttgtttgaaacaatccaaacctgctcttctcagctacatatcagaccacaactacctgttatatggaatattgcctttacatgggcattttgtagcccaaaatatggcaaatattcttggctaattaatgttccatgtacaattgagaaatgctgttgttgggtaaaaagtcctataaatgttaattagaccaaattggttgatcgtgttgtttgggtcatttatatccttactgattttttgcctacttattccatcatttactgaaagaggagtgttgaactctcaaactgtaattgtggatttctctatttctcctttcaaatctattagtttttttcttggggattttgaagcctctgtggttaggtgcaaacacgtagagaactgttaggtcttcttggataattgacccctttattactatataatgcctctattcctgattatcttccgtgttttaagtttactttaaaattaatacagctactccagctttcttttggctggtgtttgcatagtgtacatttctccaaccatttccttttttttttttttcatttttaattgtaaagatgagattttgccatgttggccaggctggtctcaaactcctggcctcaagtgatctgcctgccttggcatcccaaagtgctgggattacaagcataagccaccatgcctggcctccatccatttacttttaatgtatgtatgtcttatctttaaagtgggtttattgtagacagcataaacttgaggcacgcttttttattcagtcatagtcttttaattggcatgtttagaccattcatattttaaatggttattgatatggtcagatttaaatttaccacgttactagctgttttctatttgttgtttgcatttttttctcttttacaaccttctctgtgtttatttttctattattttattttattttgagagcgtctcactctgccattcaatctggagtgcagtagctcaatcacagctcactgcagcctcgacctcctaggctcaagcaatccccccacctcagtctcccaaactacaggcttgtgccatcatggctggctaattttttttttcataggtagagtcttcctatgttgcccaaactggaagtattttttatgattcaattttgtctcttctattaatatatcaatattgaatatcccctctattaaagtatttctatgactcaattttatctcatttatactttaaaaacagttttagtggttgctctagcatttaaaatatacattttaaaataatctgagtatgccttcaaataacgttatgcaattccaccgttattgtaagcattttataaaaatatatttccaattcttccttcccatttcttgtgccttgtttgccatacatttcacttttccatatgttataaacacatattctattgttaccatgtttgcttttaacagttatcttttagaggaaatataaataaagaaaaaatgttttactttgcttttatttattttattttggtgcttttttgacctttatcatattccttctccctaaagatctacctttattttttatttatttatttatttttttgagacagagtctcgctctgtcacccaggctggagtgcagtgatgcgatctctgctcactgcaagctccacctcctgggttcacaccattctcctgcctcagcctcccaagtagctgggactacaggcacccgccaccatgcccagctaattttttttttttttttttttgtatttttagtagagacagggtttcaccatgttggccaggaaggtcttgatctcctgacgttgtgatctgcccatcttggcctcccaaagtgctgggattacaggcgtgagccaccgcacccggcctaaagatctacctttagtatttatggtagagtaggtttactggcaatgaatttcctcagtctctgtctgcctgagaaggtttttacttctcatatctttttaaggatattctaagtaggtatagaattttggattgccagccttttttttttttttcatttagtactttaaagatgttaatccattgtgttctggcttgcatggtttctgacagaagtctgttgtaattcttatccttgttcctcaatagatagcatgtttattttctctgatcaccttcaagagtttctctttgtctttgatttacagcagtttacatatgatatgtgtaggtatgtttgtttctttgtttttggtatttatcctgctggtgtgctctggtattcttaggtctttgattctgtgtctctaagttttttcttctttttaactataaaattcagtgtctgtacagactgtcaaaaattgccaatgctgactatatttcaagtcatcatggtggagtattgggaaaagttttcaattagcaataatcacacctcagataaacctcattggctatgatactgccactgcataaagctctgtcactaatttttaaaagttctcagccattatttttctcagatacgttttctgcctaattttatctttcttcttcttctggaattctaattatgcttatgttagactgtctgatatttctgatattgtcctacagttcttggattatctgtactgtcttgagattttttttgcttttttcctctttgcattttattttgggtaatatctttaagtttacttattctctacccagctctacaaattatactgatgggcccatcaaaagcgcatctcatctccattactgtgttttgtttctagtatttatttccatttgattctttataatggtttccatttctctgctgaaattacctatctggtcttgcatgctgtctaccttttcctttagatcctttaacatattaatcataattaatgtctgatagctccaacatctgtatcatatgtgagtctggtcccaatgtttgcttcatctcttcagagtgtgcttttcatggttttttgtatgccacatttttgttgttgttattgagagctggaaatattaaatagaacaatatggtgaatattccagttccaggatcaaatgcatgtgactagagacaatttaggaatgaaaagaagttatgtggaggttttataacctacagttcaagtctacagtggtttggaaatagactttgaaaaatgggcagcttagactttccccccactttaattttttaaaatcaggataaagcatacatatgggttttttttttaatcatagtctatagcagaggtcagcaaattttttcttaaaaagccaaatgacaaatattttaggctatgtgctctctgtcacaactactcaactctcccattatcaacacaaagtcatccatacactcatacatccacatatttatacaaatgagtgtgactgtgtcccaataaaactttatttacaaaagaggcagccagcctgtgggccatagttaactgattcctgagctatagaataatattaaatgagcaaagtcttgctctccatgaaggagtcctgctctccaggataaccacatttaactattttttgcattctttgggtggatgcacacataattctatgtaatataggcttataactctatttattgatatattaatctattgagactccctcacccaaccatgaaacatgagaaaatttcctcccagcactttgggagcccaaggcgggtagatcacttgaggtcaggagtttgagatcagcctggccaacgtggtgaaactccatctccaataaaaatacaaaaattagctgggcatggtggcaggtgcctgtaattcccagagacttgggaggctgaggcaggagaattgcttgaacctgggaggtgggggttgcagtgagccaagattatgccacaatactccagcctaggcaacagagcaagactccatcacaaaaaataaaaaaactaaaaattaaaacactttttttaaaaaataaaatttcctgtcttacattacctcttttttctgtgataagcaggtaaacccacccccagaggccaaaggagctgagaggtaaaagaaagagactaacaaatccagtttctcagaaagaaacatttaggctgggcatggtggctcatgcctgtaattccagcactttggggggactgaggcagatagatcccttgagcccaggagtttgagaccagcctaggcaacataatgagactctatctccaccaaaaatacaaaaattagctgggcatggtggtgcatgcctgtagtcccagctacttgggagactgatgtggatcacttgagcctggaaggcggaggttgcagtgagccatgatcatgccattgcactccagcctgaacaacagagtcataccctaactcaaaaaaaaaaaaaaaaaagtcactctgttgcccaggctggagtgcagtggcatgatttcacctcactacagcctccgcctcctgggatcaagtgattctcctgcctcagcctcccaagtagctgggattacaggagtgcatcaccacgcctgactaatttttgtatttttagtagagatgaggtttcaccatgttggccagactggtcttgaactcctgacctcaggtgacactcgcctgcctcaccctcccatagtgctgggattacaggcatgagtcaccgcatctagctaagaaagaaagaaacatttaataggaactaacaaacagaagcaatatctctggtggccaagagacggttgattcctatacttgccctccagaaagtagtctttatatagcaagctgcttttggtaaaacatgtacagttggtcacgtctcagaccctcccacaaagtgtgtgaccactgggaaagttagataagcatctttataaggggttatctatgctacaggaattgtttcttggcctgactgcaggaacaccttggtattcaggagtcaaacatcgatcctgatggtgatttcacttcaggtggcattactcttgccttgcaacaggctgttttcttacactctttcctccgcaaccctctaagacttgtctttcatcaacatatattaatagtttttcccattggtttgtttccctttataactttgctgtttctttttccattaacaggagaccgttcctcttgagcctcccctgggcaacatgaggatcttgctattccttcctcaccctacccttctccccatctttgcccgactgctattaatgctactgttactttcacagcacccatattataatgtttgcattctgttttgtaaattaattaggtctttggtgctctgccagaagttgattctaaaaattgcaaccgaagaaacaatatttacattattttaattatataaatattagtcattgcagaactaagtagtgtgattggagaaataaatataattcactggtactaaatcagttccaagcatcaaagtcacatgggttcttttttcttatactccagtaaatactcaaaatcatgtcacgtttcaattttcagtctaaccaataatcttcaagaactcttgttctctgcacctttactgggtcaacctactgttgtttcttggaagcaatgtgctgacatggcgctctgagacgtccacatcttgaatcgtctctcctttccctgggaaccaaccttgggttgcttatcttggttcttctctttgaagctgttagttttcctaaaggttatcttgaggaaagcttcagttcttcatattctaggaggtattcaaaagaacgtcattaatccattaggctgaactgttttctcctttctccctgtgtattggtatgattgatattttaacagcctgggaagctaagagtgacgtcaacaacctcagctgcactgagagtgaggtgaatcattccagagagttctgagcccaaacacacactggcttgagtggtcctgggcttggtgttcccaacaaaggctcttagaactctctttaagcctcagtcagtatttggtgatccagtgggtgttttccaagccaggctgtcagcttgaagagttctcccttggggcaaagtccttttagcatctcaatttaggtaatgagttccctttaaaatgctgaaaggacctgatgtggtggctcacatctgtaatcccagcactctgggaggatgaggcgggcggatcacttgaggccaggagtttgagaccaacctgcccaacgtggtgaactgctgtttccattaaaaatgcaaaaattatctgggcgtggtggtggacgcctgtaactcccagctccttgggaggctgaggcaggagaatcacttgaaacctgtaggtggaggttgcagtgagccaagatcacaccaccgtactccagcctgggcaacaaagtgagactcaaataagtaaatacataaataaaatgctgaacaggttaatcccttgaccttctaaaattgggaaagctgggttccaggggctgagcacaatgcacagaaataaacgatgtgagtcattggttccaggaactcaatattctcagcgaggggccctccagagcagcaagtgccaatggaagcatctctaaattaattggatctctttgtaaatccaaaggacaaattaaataaatgaattgtctgaggccagttgatttgtagttcacatttcctctgcaaaggcttgactacagatttattcatgcatttctgaagccacgtgatttagtgctgaggccttcttgggcctttgataactgccatgattattaaggccttggaaggtataaaatgtgtttttccacaatatttacttatgtcctctgtacaaaatgcataaatatgttaccaagaatgttactaaaaacagaaaagaaagggcatgttgtttttttcttttccctctgaggcactgcttaaatatcatctgcaaattgttaattgctcagcttgcgcttttatgacagggttggacctggggaatgaaaaacagctcccagtgctgatgcagggacacacctggctggcaactctgttttcagaatgccaaagagtgtaggcttcattccttcattctgtaatagggtacaatgggcattgtctaacctttattttagctacttagagggaaaaaagctaccatgacacttgtggtagttaattttatgtttcaacttgactaggtcactggttgcccagatagctggttaaacattatttctgtatttgtctgtgtgggtgtttctggaagagattatcatttggattagtgggctcagtaaagcagattgccatcagcaatacaggtaggcattgcccaatctattgaagacccaaacagaataaaaatggagcaggaaggaggatttgccatctctctgtctgatgcttgccatcttcccccagtgctcctgcttttcaggccttcagactcaatctacaccattgaccctccaactcttaggcctctgaattaaccaccagctttcctgagtctccagcttgcagacagcagattgtgggacttctcagcctccatactcacgtgaaccaataccgtataataaatctcttcatatgcagtcatgcattgtttaacaatgaggatacattctgaaacacgcattgttaggcaattaagtcattgtgtggacatcatagaacgcacttaaacaagcctataggctttgtggtgtagcctgttgctcctgggctacaaacctatacagcacgatactgtactgaacactctaggcaatgtaacacaatggtaagtatttgtgtatctaaacatagaaaaggcacagtaaggctgggcgcagtggctcatgcctgtaatcccagcacttgaggttgggagtttgagaccagcctggccaaaatcaggaaacctcatcttttctaaaaatacaaaaattagctggatgtggtggtgcactcctgtagtcccagatactcaggaggctgaggcaaaagaatcgcttgaacccaggagccaggaggcagaggttgcagtgagccgagatcaccccactgcactccagcctggggaacagagagagagactccatctcaaaaaaaaaaaaaaaagagagagaaaaggcacaataaaaatactgttgcatatgtggcctgtcattcaccaaaacattgttatacagtacataattgtatatctatatgctactggttctgtttctctgagaatctagactaatataccacctaatggtgatctctaatgttgcaaggacaataactatcttatctgtcctcacacattttattgcaaagtgacattgtgtgttgtccagactgagaatttaccagctataatttccccccacttcagaaacagattggcaaatcatgatcaacaaaaactatgctcactgagagaagtcacccactgttcagacacaggagtgagactctgggggcaggagggcatccaggaggaatatacaatgactttccctttaaacacagaagctggaacaaggctctgggtttaatctgacttggaattgcctctgtggttctcagccagctctgaggaagttaagaacccacccttgcctgttcaaggctggcttccagctcaggaggaaggctagggggtgagaattaggaatcccccaccaaaacacacacacatgcacgcacacacaaacacacatgtccaaagctgactgtttttctctgggattgtatttcaaggcctctgaagtcatcaaagtctctaaaacacaggtggtcatggggcttttcatgataaacttttggaatcttctcccctcattaaaaccaaaccacagttctgcagggcttctccgagagccagcctgatgggacccaagtccatgaaggcttcctccattaccagtgagcagcctacagggaccccaagcgtgacctggggtggggccagagggcaggccaggcactctcggcctcccgagacctttctcatgcctagcgtactccgcaggcaccttgatgcctagtgagcgaggaatccagcttagcaaagaacaggcacagacatttcctgcttgattggaatcgttaatactcggttccaggaacctgacaagctctgcttcgcttggcacctagcacagtcccagatggtaaatcttccctgtcaccaccattgtaactccccagaggggtcctggaattgctccaggaggccttgtgccaactgctaaatcccaatgtccccttctcgtcgtctcaccacagcagttcacggtccaagaccctcgatgcttccatgaagaggcagatcggcaccttgttgcatgcagccaaaccatacatgagtgcacaatacaaaaatgatgatagatttgagctcagtgggtgagaggcagcagctgtgtgtttactcaaggtgagtttggaaaagctacatggcatggtcaggcttttgagacttgtttgaaatgtggccggaaaaggggaggctgacgtgggaggaagaaatgggcacgtgtccctggcatccgctgcgagtcctcctgcctccctgagaacacagtgcacagcatccgggagagactggccaggacttggtgttcagttacctccaacaccaaagacagttggacttgcattccctggggccagctcacaagcttcagagagctcacagcataatgtcttcttctgacacatgctcactgaacatccaccatgagccaggcactgggtaagcactgaggaaacacggggctagtgacaaggatgtctctgcccccagtgggctgtcagctcactgggcagaggagttgggcaagtcctggggcagagacagaacggcccttccatgcagggcacatggcggtcaccaccgccagaggatctgctggagtaagcaggagaagccctgctgaggtctggatgttgatgtccccccaaattcctatgttgaagcctaacacccgtgtgctggtgttaggaggtggggcgtttgagagctggttaggtcatgagggtggggccctgatgaatgggataggttcctacaagaagaggccccagggagccccctcgccccttccaccatgggaggacacagacagaagtcaccatctatgaaccagaaattgggccctcaccagacactaaatctgccccttaatcatgaacttccagacctccagaagtgtgaaaaataagcatgttgtttataggccacacagtctatggtatttcagtattgaagcccgaaccacccaaggcaggtatggcatccaccatcttgcaggaagtggatgaaggggaggggcaagggagggtggaggaggggagccggcgctgagacccaaaccaagagcaagggcaagctgaggggcgggggcattgttggagaccatgcttaggcatttagaatttattctaaaatccatgaaaacttgctgaaaatttttgttttcatctatgtgacattgctatcatctgtatgctaacaactcccacctttatttcctcccagacctctgttctgaacgccatgtgcctcccctggtctctggaagtccagtaggcacctgtacatctagacacctcccctgcacacaaatctgctcttcctatgacagtccctgtgtcattgtcataagagatacatttgattctccaccctggttctggcacgagaactctaaaagccttgggatttcctaagagatgagggtgagaggaatgtcttttgttattcaagatgagccccttctaaccatacctgagtttatagtgagctcctagagagcctcaggtgggagtggttgccacaggaaccaacctcgtgactacagggttagcactttcagctcccccgtctcccttccaaggagatgagaaggactggaggttgaggtacataccaatgcccagtgttttaatctaccatgcctaagggatgtgacctccacaaaactcttcagggacagggctggagagcttccgggctggtgagcacagggaggtgctgggatggtggcgcatccagagagagcctggacactccgcaacagtcaccccgatgccttgcccagggcagtccttctctgctgcccctgagttacatcctaatcataaaccagtatgtgtaagtaaaatgttttcctgagttctgtgagctgttctaaacctgaggagcagtttgtgggaaccaccagtttgtagtccattggtcagacgtctgggaggcctaggccttgcaactggcctctgaagtgggggcagccttgcaggacagagctcttaacctgtaggacctgaggctgatggatggtgtcaaaactgaattgaatcgtaggacaaccagttggtgtcgggagagctggagaactggttagtgtgaggtaaaaacccacacacttggtgtcagaagttagaacagaaatgattcaaagtccctgtgtcagtgaatgctttgtctccgcctggatgcctgtgccaggcacctgggaatcaccacacaccctccacattcggtgcgtgcccttgtctgtgggttccgctccacaagccaccacaaatgtatccaggtctgtgcacctctgctctcaccagcctggccccagcctggccccagcccagcctccctgagccactgcagcagtctcccagaggctcaaaagtggtgcttaagacttgcatttgagaaagatgggttttggataaatgtggaggatggactgggggccagtgagaaggggacaagggatagtttcagcaacccgttccttcatgtgttcactgaagtcatgatgcaccgtgagggcctgctgtgggccaaagcctgggaggggactggggatagagaatggagtgtcacccacagagagaagaggttcattgggcggggagacggctgaagttgccaagagagagctcaaagggaggcagggctgaggccagaaaccctaagggatggatcaaggagaggaattgaggaaggacagagagcaggagcatatggacagaggagaggcagaagccgggctctgcagggctgtggaagctggaggagtaggttgtcccagagtcccgtacccctggggatccaggaaggtaagagggaagtcagcaacaaggaggtgggagaggttcctcggcatgtggggcggaagccagactgtggtgattgagaaatgtgtaggggtggaaaagtggctgcaaggcacgaccacaggcgggagagccgactgtgaaatctgcaggaattttctgagccaggcgccaaacacagccagtgttaaaaattaaatgatgaaaacttacagttaaataggttacatagagacaaagcaataaatactgaaaactcatctcttcctagtttgttaccttctaccaatagctattcccctgagataatgtccatccattgtgtccctgtggtgagaatgctatatgtgagtgattactcacgtctatgcatctcttccaactctgcgtgtcgtgttatctcactggtggcttgaaattggctgtgatgggagtatttacaccacagaaaccagcaaattcctcaaatcagacctttttattcccagagagtcagttgtgaaacgtttaccagcaccactggaggagtgagatcagagcactttcagtaagagagcagtggcacgttagcaaatggaagggagaaaaagacagcagcaaacgtggacaggtttgcgggctttgtggcagggaagtgagcgcgttgcctctgatgactttcatttctctcagttacactgaggtgaggccaactgctctgtgtgtggaagccagagaagaaagcagcacagaacagatgcaaaccaaggaggctggaagataagagcagagccatcaggacacgagcccctcgcgggtatgaaacaggagtcgtgggagcaaattagtaggtgcactgcatggagggacggaaggggcagggaggagcatctgaatgtaagatttcagagaagctcattttgtcagcatttcagagcttcctgtgtgcagcatggatctaaagctggtggatgcaggggggtgaacaagacaacatcttcacttcctgcatgctgatggcagaagtgagacatcagcgaagaaacatcacgatcaccaaattacgatgaacaccatggaggaaacaaaggacactgtgacaccaaggaaggaagggaggttacttttcatagtggctgtaaatagaactgaaggctgaaaaacagctgttaaaatggcttgtttgtttgaagatgaatgagagtacacaataaaaggtaattctccctcccatccccaatgccagcttccctgtttctctccccagaagcagccatggttcatcacatccatttccagaggtatcctaggagcaagctgtatgaggaaccggggaaagaggagcatgtgcaaaggccctggggtggaaagggcctgctgtgctctgagctgcagcagagcttctcaagccttaatttgcatttgaatcacccagggatcttgctgaaatcctgattcctgattcagtaggtctggagagggcttgagatttctaacaagctccaggtaatgctgaggtgcctgatccagatctcacttagagtattaaataaagtcctaggggatcgttagagatcaatccagccagaaatgtcataggagagggaagaacaggtcaagacagggctgcacagacaggtggggcggctcagtcggggtctctgtgcagtaagaagcgtgggtgttattctaagtgcgacaggaactcactgaaaagctttgtgcagactggggttgggagtggcgttacatgatctacttattctttctaaatcactctatctgctggttgggcaggcaaagtgacagtgggagatccactgggaggctactgcacaaatctcagccagaggtgacagtgacaggacccatgtgatgaccgggaagatggacggaagtgggcagaccccaggggtatttttttttttttttttttgagacggagtcttgctctgtcacccaggctggagtgcggtggcgcgatcctggctcactgcaagctccgcctcccaggttcacatcattctcctgcctcagcctcctgagtagctgggactacaggcgcccaccaccacgcccggctaatttcgtgtgtgtgtgtgtgtgtgtgtgtgtgtgtgtgtgtgtgtgtgtgtttggtagagatggggtttcaccgtgttagccaggatggtctcgatctcctgacctcatgatccgcccacctcggcctcccagagtgctgggatgacaggcgtgagccaccgcgcccggcccctaggggtatttttaaggtggaaccgaaagaactcatggatgggttggatatggggagtgagggaaaaggaagcatcaaggacgcctcttggggttgtgtcttgagcaagcgagcagcctgggccagcatttactgaggcggagggaggagcagggagattgagaagcctgcacgtcaccaagcagagatgtcaagaagacctcggggcgggggtgggggggggggcggggggcaggggcgtgggcatgtgtgaggctggggctccgaggaaggtcttggcgtggaatataagttgggagttgtcagtagaggcattttccaaggctatgagaatgtgctgtagagaagagcaggagctctaggatgaaccctgatgggcatgatccctagggattgggtagaagaacaagcgaccagaggggcgcggagggaggctgcaggcggctttgccagcaggatttgaaatgaggagattttatcagggctaactcaaagggtttgcatttcaccttttgccccctcttgcataaatggcgtcatttgaaaagagaagagacgggaaggagggggagtcaggaacgcgggcgaagcgcatctgcctggttctggtgagaccagcccggcaactgtcaagtcatccctgcttaataacacctgctggaaggacaaaggaaagagctgctggcaccgagtcacatgtccacacaaaccacagagcgggccgtagatgccaagcccttccccttcccaccctgtacctgttcttcatgttaatctattactctaataatttattcattgtgtagcaaatgatcattttcctatcatttgtttattactatttttactttcattatcacgttagattttcacacatgggagcatatgggggacatatttgtttattagtttataacctaaaatgaatattttatacaggaacattttaaacagaggcagaaaaacccttaacccaattttatcttatgctaaaatttcattatcaccaattctcaggcctccaagcactgtgcaaacaatcctcgaggaatgggtgttatcaattattaataactattaaattagcatggagtttgattttcccctaagtatgtttcataactgcagagcagagaaagagcctctgctcccttccgggtctcctgttcaaataaacctgaacctggcccaggcacccaggcatcttggagtggccagcagtgagcccacggctgtgcctctgccctgcagggcacccggggcctggaaatcctccggggtggaaggatgaacccttctcccggggaatttctggcaggtgcatgtgatcttgatattctctgcaagtggcagaaggagcttgtccccctcaccatctgttacgggctgaattctgtccctccaagattcaaatgttgaaaccctaacctccagacatccacaatgtgactgcatttggaaatagggcctttaaaggtgactaaattaaaatggactggtccttacttcaatatgactgctctccttataggaaaaaaatttggacacagacacacacagagggatgaccacgtggagatgcagggagaggatagcagctacaggccagggcgagaggcctcagaggaaaccagtcctgctgactctttgaactcggacttccagcctccagaactgtgagaaaataaatttctgttttaagtcatgtggtctgtggtatttgctttggcagccaacacaaactaacatgccatctgcacccttccctcccaccgtgtctgatgcccttaggaaccactgtcttcctttatcccaggatgtctgcaaggaagaaaatgtcctttttctagcatttagaggccaccaacattgaataaccacactggggtagacacagcggcgaagagattcctgctgttcccatcacagcagccttggagatgagaagacagatggatctgaccagagtgagtcccagcccgaccttctcccacacactctacacatcagctatcaagactgagccagccttgtgagggcagagtgggagggagatgaggcccaaggttcttagaattcacctggcctcatcaggaccttcaagatcttcctctcttctctgctaccaaaactgtgtgagggggaaaaaaagccagggtaagattggaaattcagccacccacatccttgcagtgactaacagctgttaagagacattttatttgtgttttgttttgtgacagagtctccctctgtcacccaggctggagtgcagtggtgcaatctcagctcactgcaacctctgcctcctggctttaagtaattctcctgcctctgcctcccgagtagctgagattacaggggcccgccaccacaccctgttaatttttgtattttttagtagagacggggtttcaccatgttggccaggctggtctcaaactcccgacctcaggtgatcttcctaccttggcctcccaaagttctgggattacaggtgtgagccactgtgcccagctaagggacattttaataaaccccaaactgcaaacagccttaagctaaaaaatggtattctgagcatgtattctcagataggaaggtttagaagagcccagcgaagctggcttagtgcccttcaagtcaccccaaaagagctagctgcctgactgaagccagagcctgccctccttttaatgtgtacagcatctcacggactgccctgtttacagcacctcttacggttagatgtggccaccacaaggatgctctgctgtgttcatggacagcatagccatgggggggacacgggctctggggtcagatttgtttctgtttgtgtctcagatctgcgacttaatatgtgtgacctcagcgagttacttattcctcctgtgcctcagtttcctcatatgcaaagtgggataataatggcaactcccacatagggtttgctgaggattaaatgagtgagtacacgactgtagcacgatgtaggagtgtttaatggcattatcgtcatgattagctgtgtgggccttggcttcccatctgtagcatagagctaccaatacctacctatggcatattgttactttggggattaaacgagacgctgaatgacaagcacatggcatataggtgcaagtgtttgttcctttcctgcttctaccattttttttcccgagacagagtcttgctctgccgcccaggctggagtgcagtggcttgatctcagctcactgcaacctccacctcccgggtgcaagcaattctcctacctcagcctcctgagtagctgggattacaggcgccagccaccacatctggctaatttttgtatttttggtagagacgaggtttcaccatgttggccaggctggtctcaagctcctgactttgtgatccacctgcctcagcctcccaaagtgctgggattataggcataaactatcgcgcccagcctgccccttctactattttaaggaacactggtgattcagttaacatctcatctggcaggaacattcattgataccaacatcctcaacatctaaccgagttgagtaaccagaataactacctccagggtcatgctctgaggattccagctttatctgtagtgaaactttctctgacagcctgctgatttccccttcccagatacaaagtccttttgatcacttactatgagtcagacacgttctgagctttatctcctttaatcctcaccataacaccatgaggtagatatcatcatccctgttttatagatgagaaaagttgagcgtaaaaaggttaaaaaaaactccaacactttgggaggccgaggtgagtggatcacctgaggtcaggaattcgagaccagcctggccaacacggtgaaaccccgtctctactaaaaatacaaaaaaattagccatgcgtggtgctgggagcctgtaatcccagctactcgggaggctgaggcgggagaattgcttgaacctgggaggcggaggttgcagtgagccaaggttgcaccattgcacttcagcctgggcaacaagagcaaaacttcgtctccaaaaaaaaaaaaaaaaggttgaagaaacttgtccaaggtcacattgctggtgcaggtcacacccctgtcataaaaccaggggatttccgactcccaagcccagccttgaacctctgtggtttccagaaccagagctgatggggagcagctgataccatagaagctgtcacaggcaggcatggggacaggaaggagagcagacggtggagtagcagagtgtcccaagctagtccaggaggggcaaaggatcctatggagacaaagagggactgatcatcattttgagccaggcccacccactgtcctcccttcctcatccttgttcaggtgctgtctctttctgttttccgaacattgccaacaactttgtttaaaaacgggctttattgtgatgtatttcacacaccgtacgattcacccatttacagtgtaccacggagtcgttttttaatatattcatggttgtgtatccaccactacaatcagcagtgcattatcattgccccagatgtcattagaacaccatcattaccccacactagccactgtgccccagtacccccagccccaggcagccactaatctactttctgtctttgcagacttgcctattctggacatttcatataaatggaatgatacaaatgtatggtcctttgggactgatgtctttcacttagcacaatgttttcaaggcctagttttaaagtaaatttaaaaatggttaaaggtcaatgtgtagtgcttggcacaaagtagagaggctcagtaaattcttattgaattgaaatacaatttttttttttttttttttgagatggtgcttcactctgtcacccaggctggagtgcagtggtgcaatcttggctcactgcaggctcgacctcccgcattcaagcgattctcctgcctcggtctcttgagtggctgggattacaggcgtgcaccaccatgcccagctaatttttgtattcttagtggtgacggggtttcaccatgttggcagggctggtctcgaattcctgacctcaagtgatccgcctgctttggcctcccaaagtgctgggattacaggctgaaatagaatttccgatcataagtaattgacccgagtcatcaataaaaggctacattatatttgtcacattctttttttttttgagacaggatttcactttgatatgcagactatagtatagtggtgccaacttggctcactgcagcctcaaccccctgggctcaagcaatcctcctgcttcagccccccaagtagctgggaccacaggtgtgtaccatcttgcctggctaatttttgtattttttgtagagacagagtttcaccatgttgcccaggctggtctcaacctcctgagctcaagggatctgcctgccttggcctctcaaagttttggaattacaggcatgagccactgcacccatcccatcccattttttttttttgagatggagttttgctgttgttgcccaggctggagtgcagtggcgcaatcttggctcactgcaacctccgcttcccagactcaagcaagtctcctgcctcagcctcccgagtagctgggattataggcatgcgccaccatgcccggctaattttgtatttttggtagagaccaggtttcaccatgttggtcaggccggtctcaaattcttgacctcaggtgatccacctgcctcggcctcccgaactgctgggattacaggcatgagccaccacacctggcccatcacattctttaaaaagcggagaactgattaacacattcttgaaaatgtggagcaaatgttgcatgaccaagtgtttcttaatcagtttcctgaaattgcagctgtcttctttcaattcccataaaagtgctttaacattttttatactaatactgtagttcctcaaattttgacttctgagcaccaataaggaaatgtggagagaagggacattgctacacagttggtaggaatggaaattagtataactatcatggaaaacagtatggagcttcctcaaaaaattaaaaattgaactaccatacacatccaaaggaaatgaaatcagtatatcgattgggggtgctggctcagacctgtcatcctagcactttgggaaactgaggtaggaggatcatttgagttcaggggttcaagtccaggggtctccctatgttgctcaggcaggtggatcacctgaggtcaagaatttgagaccagcctgaccaacatggtgagcaacatagggagacctcatttctactaacaatttaaaaattagctgagtttggtggtgcacacctgtggtctcagctactcagaaggctgaggcaggaggattgcctgaacttgggaggtcgaggctgcagtgagccctaagcatgccaccgcactccagcctggataacagaataagatcctgtttcaaaattttctttttgattgatttctgaaaagaaatcagcatggcaaagagttatctgcacttacatgttcactgcagcattatgcacaatagccaagatataaaatcaacctatgtgtgtatcaatggataaatggatttttaaaatgtggtatataaatgcaatgaaatgctattcagccttagaaaacaagggaatcctgttatttacaacaacgtggatgaagctgtggacattttgctaagtgaaataagctaggcacagaaagggaaataccacattatttcattcataagagaaacctaaaaacctcaaactcataacagcaaagtggaatggtggttaacagggagtcagggcagaggtgatggggaatgcctttaatggccagagaataccaattttcagttaggcagaagttcaagaggtctattatacagcacggtgtctatagttaataacaatgtattgtatgcttgaaatgtgctgagagtagattgcatatgttaattagtgtgatttagtcatttcacaatgtaaacatatataaaacacgtagtacatcataaatatatataatttctatttgtcaattgaaaaacagtcgtctggacctgcttcctgtcacataggtcaatttgcatcttttttttttttttttttttttttgagactagcgtctcactctgctgcccaggttggagtgcagtggtgccatccgggctcactgcagccttgaacttctggcctcagatgatcctctggcctcagcctctcatgtggctggggccatatgtactcaccacaccacctggctaatttttaaagtttttgtagagctgggtctcttgttagttgcccaggctgacctcaaactctggggctcaagcgatcctcctgcctcagcctcccaaagccctgggattactggtgtgagttgccacacctggcctaatctgtgtctttatcaatactataggaaacgaaaaagaaaaaacaaagaactaaacaaactaccccttagactcaaatagccaattactgaaactgaatttgactcgcggattctggttacttgtgcatatagcccaggtttctttgggaccccagggcttgtcatcaaagacaaagtatctagttgaatgggggagatcattaggaggcagtggcaagccccagaaaagaaagtgtcccaccgttgggaggcacatggggaggcgggtgggagttcagtcacgcctggcagaggatgtatggaggcaggtccctcatgcctttaactgctccactgctgccttacaacaaaggagagaccttccagaccctcatctggcatccttcccctcttttctcctgagccctgacattctggcaatgcttcggcaacacagaagataaagcgtggagagggagactcagccacattttcttacagatgagggtgtgtggctggaaaagggccattatcgactcctgttctcgcttcccctcctctctcagagtctggagaacttcgagaaaaaaggaggaggacacaaaaggaaataacaaaaaagatgcatccggagcaactatgaggatggtaaattggtgtctaattctgaaaatcataattggtataaatgctatgtactgtggaaggagggatgaagggtagagggaataaaaaagaacatgaagttagaatccttggcatgaaagcctgccatttatacaagcaaacaaacaagatcagggactatcaactggctggctgaattggaccaataggcaggtttattcagccccacacttcaaaaattaggagatctccaaattaaaatctgggaatctgaccttttgtaacaaatcagaggatttgcaacaccaagagcatcatcacaggcaacgaccagcttggatgggcagcggctgcccctgcaggtgggtcaggtgctcttccgttggacacagtctccaccactccctgtcgcttgctccttgctccccatcagcataactgtttgggccttatagcatatgcatttatcactccctactaggacgtccacaacatgaaatgagagaacgatttggtaagttcaacaaaaggcatattatgcagccaccatacattctttgtggaaagagaagtggcataaatcaattcataaattatctcaagttgtttcctctggagtcctgggctggctgttggatgaattcatctgtcttctagcagatggacaagaaaattgaattgtagtggcccatcaggtgtcgatcgcagcctctgggtccgtgtaggtgagccctcaccacagagagaatgagagctggctctaggacggggtgttgatctgtgcacagctgcccgggaaagggcctagagagaggagctatgggtcctgcactgacatcagccttgaacatgaggctggcgtggcagcggcggcggggtggggggggacatgaataattcatatcgcaaccagattgatgctcagtgagcttcaataggaatgaattaccttgtgtgcatttcctgcctaaatgtcagtgtatcttttcacaagcgcctgggacgggtttatgaataggtgcattctctgatgcctctgctttaggcaaggcagtttcagaatcttggctgagtttccaacttctgacttg

SEQ ID NO: 13 - DNA, 4319 bp, Homo sapiens
cttccttccctcggcgcccacgcccgccgcaggccactgacttagagggcggatccggaggtcacctggagtcccgggtccctctcaccgacgcgcgcgggtgccctgggccagtcccggactgacttgccaccacctccgggtctccggtgccccccggccctcccggagccccgacagcgccgctgcgcggacaggccgaggcgggtcgggagcggcgcgggcttgggagggagcgctgggcagccgggcccgcaccccgattgccctccccgcaccccgatcgccctcccgcctcccgcggggcgtccaaggcccaggccggcgcctgcgccccccgccccgaggtctcggccccactccgccgggccagctgcggaggcggcgttgggagctgtgcgccgcgggggaggtgcgcgcggcggccggcgaggggagctgagcggcgtccgcccccgccgagccgagcggagccgagcgaagccggcgcgcctgcagctgggagctgggagctgggagcgcgccgggcgcagggccgggccggccgcgggagggtagtgtcagcgcccgcgtccagctcttcggccgcagacccgggctgtctggaggccgcgcggccacctgctgcgtcgccccggctttgggctggggctagacgcgcaccgcggcgggagcagccccggctcgccgcaccccgcggaaggtgcccttctctgcgcgtctcgccgagcccgggccacgctcctgtcccaggttttaactccatgattgtgtgctatgagtatatggctgcatgtctcaagaaattcactggctttaaaatgtgggcttagctactgccagtatgatttgatgaaagcggatagaggtctcagatccacccccggattccaccgtcaggcccaaggacggacccctggccattgactgatgccaagtgggtgcctggcagcagccttccttcccatccctgcttctggacgcctcagcccgagcttgacatgatttccacaagggtgatggacattaagcttcgggaggctgcagaaggccttggggaggacagcacaggaaagaaaaaatctaaattcaaaacttttaagaagttttttgggaagaagaagagaaaagaatcgccgtcgtccacaggaagtagcacctggaaacaaagtcagacgaggaatgaggtcattgccatcgaatccgggccagtgggctacgactccgaggatgagctggaggagtcgaggggcacgctgggcagccgggccctttctcacgacagtattttcattcctgagtccggacaggacgctactcggcctgtgcgggtgttttcccaagaaaatgtgtgtgatcggattaaagctctgcagttaaaaatacagtgtaatgtgaaaatggggccaccacctcctccaggggggcttcctgccaagcggggagaggatgccggcatgagctctgaggacgacgggctgcccaggagccccccagagatgtctctgctgcacgacgtgggtcctggtaccaccataaaggcaaataaacttacacttttattggaaaataggagagaccttcacatgaacaagaagaggttgttcctcccgtatcgaagcccatctcaccagtacgatcatccttatggttccctgtccgggcgctccgagtttcatcccaacttgtgtctgcaggggagcccacttcgacctcactcagtggtggagctggccaagttcgggggcagggatctgcgggtattgccttcattctttcacatgactgccagcatccctttgtcccaggtctctgtcgtgtctccagaccacgtgagcgacagcaccgtctctgcccggatctcagacaacagcctggcaccagtggctgacttcagttatcctgcagaatcctcctcctgcctggacaactctgcagctaagcacaagctccaggtcaagccccgcaaccagcggtcgagtaagatgaggcggctctcatcgcgcgctcagtctgaatccctgagcgacctgacgtgcaccccagaggaggaggaaaacgaggagaagccacttttggaagtcagcccagaagagcgccccagctctgggcagcaggacgtggcgccagacagaggccctgagcctgggccaccggcgcccttgccgccacccggaggggcccgtgccagacgcgcccgcctgcagcactcctccgcgctcacggccagcgtggaggaggggggcgtccccggggaggacccctcaagccgcccggccaccccggagctcgccgagcccgagtcggcccccactctccgcgtggagcccccgtccccgccggagggccccccgaatcccggtcccgacggcggaaagcaggatggggaggcgccccccgcaggcccgtgtgccccggccacggacaaggcggaggaggtggtctgtgctcccgaagacgtcgcgagcccgtttcccaccgccatccctgagggggacacgactccccccgagactgaccccgccgccacctcagaggcgccctctgctcgcgacgggccagaacgcagtgtcccgaaggaagcggagccgacgccgcccgtgctcccggatgaggagaaggggcccccagggccggcgcctgagcccgagagagaagcggagacggagcccgagagaggagcggggaccgagcccgagagaattgggaccgagccctccacggcgcccgccccgagcccgccggcgcccaagagctgcctgaaacaccggcccgcggccgccagcgagggccccgccgcgtccccgccgcttgccgctgcggagtctcccccggtggagcccggccccggttccctcgacgcagaggccgccgccccggagcgccccaaggccgagcgagccgaggcgccaccggcgggcgccgagagggcggcgccagagcggaaggcggagaggggcggtgccgagctgcgaggcgcgaagaagttctcggtgtcctcgtgccgagcgcggcctcgtccgggcgtctcccgcccgctggaacgggccagcggccgcctgcccctcgcgaggagcggcccggtctggaggagcgaggcggctcttgacgacctccagggtctccccgagccccagcacgcgaaacctggccctcggaagctggcggagcgcggccctcaggactcgggggacagggcggccagcccggccgggccgcgcaagagccctcaggaggcggccgccgcgcccggcacgagagagccctgcccagccgcccaggagccggccccgagtgaggacagaaaccccttccccgtcaagctccggtccacctccctctcgctcaaatacagggatggcgcctctcaggaggtgaagggtgtgaagaggtacagtgccgaggtccggttagaaaggtcgctgaccgtgctcccgaaggaggagaagtgtcccctcgggacggcccccgcccttcgaggcaccagggcccccagcgaccaaggaaaggggaaggcccggccccccgagccgctcagctccaagccgcccctgccccggaagccgcttctgcagagcttcacgctcccgcaccagcccgcgccccccgacgccggcccgggagagcgggaacccaggaaggagcccaggacggcggagaaaaggccgctgcgcaggggagctgaaaagagtctgccgcctgcagcaacagggcctggagctgatgggcagcctgcgccaccctggatcaccgtcactcggcagaagcggagggggaccttggaccagccacccaaccaggaagacaagcctggggcacggaccctgaagtctgaaccaggaaagcaagccaaggtgcccgagagaggccaggtgcttagagcaaatacttctgttctgtgggtgcaggagggagcagccagctgggactggggcgaggaccctgtaaggaccacatgtgctgcatgggcgtcacagggaccgtcacctgtgatggttgtggatgtgtggtcgagagccaatgaagcaaaataagagcctgtgaagcaagctgactttgttcgcagcaagtctttcctgataacccctgtgaagcccgctgtggaccggaagcagggggcaaagctcaacttcaaggaggggctgcaaagaggaatctcattgtcccatcagaacttggaagcagccatggttcatcacatccatttccagaggtatcctaggagcaagctgtatgaggaaccggggaaagaggagcatgtgcaaaggccctggggtggaaagggcctgctgtgctctgagctgcagcagagcttctca

SEQ ID NO: 14 - protein, 1002 aa, Homo sapiens
MISTRVMDIKLREAAEGLGEDSTGKKKSKFKTFKKFFGKKKRKESPSSTGSSTWKQSQTRNEVIAIESGPVGYDSEDELEESRGTLGSRALSHDSIFIPESGQDAWVRVFSQENVCDRIKALQLKIQCNVKMGPPPPPGGLPAKRGEDAGMSSEDDGLPRSPPEMSLLHDVGPGTTIKANKLTLLLENRRDLHMNKKRLFLPYRSPSHQYDHPYGSLSGRSEFHPNLCLQGSPLRPHSVVELAKFGGRDLRVLPSFFHMTASIPLSQVSVVSPDHVSDSTVSARISDNSLAPVADFSYPAESSSCLDNSAAKHKLQVKPRNQRSSKMRRLSSRAQSESLSDLTCTPEEEENEEKPLLEVSPEERPSSGQQDVAPDRGPEPGPPAPLPPPGGARARRARLQHSSALTASVEEGGVPGEDPSSRPATPELAEPESAPTLRVEPPSPPEGPPNPGPDGGKQDGEAPPAGPCAPATDKAEEVVCAPEDVDFPTAIPEGDTTPPETDPAATSEAPSARDGPERSVPKEAEPTPPVLPDEEKGPPGPAPEPEREAETEPERGAGTEPERIGTEPSTAPAPSPPAPKSCLKHRPAAASEGPADPLAAAESPPVEPGPGSLDAEAAAPERPKAERAEAPPAGAERAAPERKAERGGAELRGAKKFSVSSCRARPRPGVSRPLERASGRLPLARSGPVWRSEAALDDLQGLPEPQHAKPGPRKLAERGPQDSGDRADAGPRKSPQEAAAAPGTREPCPAAQEPAPSEDRNPFPVKLRSTSLSLKYRDGASQEVKGVKRYSAEVRLERSLTVLPKEEKCPLGTAPALRGTRAPSDQGKGKARPPEPLSSKPPLPRKPLLQSFTLPHQPAPPDAGPGEREPRKEPRTAEKRPLRRGAEKSLPPAATGPGADGQPAPPWITVTRQKRRGTLDQPPNQEDKPGARTLKSEPGKQAKVPERGQVLRANTSVLWVQEGAASWDWGEDPVRTTCAAWASQGPSPVMVVDVWSRANEAK

SEQ ID NO: 15 - DNA, 28904 bp, Mus musculus
  misc_feature (1)...(28904): n = A, C, G or T/U
ttcgggatggcttacaggttcagaggtttagtccatcatcatcaatgagggagcatggcagcatccaggcaggcatggtgcaggcagagctgagagtttctacatcttcatctgaaggctgctaacagaatatttgctaccacgcagctaggatgagggacttaaagcccatacccacagtgacaaacctattccaacaaggccacacctactccaacagggccacatgttctaatagtgccattccctgggccaagtgtatacaaaccatcacaccaaattaacataatatctttagaccaaaccgacagagttgctttgtaggaaatgcagatgatactcataccgggtagggagtccttctggtgatcagaagatggtaagaccacagaggctgtagacttcatagattatggaagccaagttaagacgaataaaggtttttcatctaaatatttttgtgagtagcgtgatgtagctggaacatggcttcagagtgatgttagggaaaggctccatgtgatactacaggtcttggtcctttatctaattggttagtgatctcttgattaccatagtaacttttctcaagattgtctacagcttcagtggatgacactgatgatatgctgctgatgatttcaggtttcaaggaatgcagatgtgcctctcatctcgagaaacgagaatttgctgcagtagtacaagaataaggaggaagcaggtatgggggtattttaatggaaccatggatttatttatttattttatgtatctgagcacactgtagctgtacagatggttgtgagccttcatgtggttgctggggattgaatttttagaacctctgcttgctccggttgttctagcttgctctggtcaactctgctcgctcagtccctgttcactccggctcaaagatttatttattattatatgtaagtacgctgtagatgtcttcagacacaccagaagagagcgtcagacctcattatgggtggttgtgagctacgatgtggttgctgggatttgaactcaggaccttcagaagagcagtcagtgctcttacccactgagacctcttgccggccctcatttccagatttaagtaacagctgcagtatctcaaaggtactatgagggttgttatcatgagaaggtccctcattctcctgtgcacgttaagccttccttgcactcagtttgacttcctcttaattctgcagttaatatgatccttgctctacatctcagtttatctgccttgttgtttctatttactttttgctatactaaccatggggactgtttcctatctgcttaggctcttggctccccctccactctactctgtgtccctctctgtggatttgtgtagaaaggacagttaacactaggcccacgactgttatttctagaaacatctgtttgcaaggttggccacagactggcatctgggagcttaggttccaggagcgttcccaccattctctgaattggaagtgttcaactgtgcaaacaatgcagttcagatccaatacctttcttctgctgttcggggacttggtattgtaccatgaagagagtattaggaagctcagccctcagtaagaacctcaggcaccaagtctgcagtgtgcgtccctggcgggcagcatttgacgccctgtgttgtaacttgtgactcctgcaggagcagtttggacacagcttcctgcagactttttgctgtgtgccttttccacgtggtaactcaactatgcatgtgtcactgtcatagctatgggtcagactgtaaagagagtccttcagcaaagcattgagttggactagaggacccctaacacacctttacttctggccttttccgtcacagcacaccactgggctatcacacactgatctctttttggctctttctccttgtattgtaccactcccttcccccattctagttttgctggattccttcctgttcaccagacattccctaaatgccctgctctacagcttctggcttttgtccttacattttcccctgcctgtgccttttatctcagacctatgcttgtttttttttttttttctcccctcccctctccccactgtgtttccatccatgtctgctcttcttcagggatccacttaccaatttctgacttggctcatgcctctccctaaacccccttggatttaggacgaagcacaaaccaatacagcatgagaggcgggtgtgtgttctaaaaattacccctgactggatctccctccttgtcaggggagataaaatgtaacatttgaagctttgttagttgacttttaacataaagccatttggggatagatgagccaatgaagcgacaagaccaatccttcagaaaccttttcagtagttttttttttaaggcttattttttgttttgttttgtattaaattatgcgtacatgtgtcttcaggttttgtgcatgtgtgtggatgtctgtggagcgcagaggtattagattctcctggaactggagttacaggacgttgtgagccatctggcacagtgctgggaacaagcctcaagtcttttggaagactgaatttagttagccaccgagcccccttgtcagttcccacctccattccttgacaaatggtggaaataaacatttacatttagtccttccctctatgactacaattagtgccaattttaactaatccaagcccaaatatgtcatctgacttttgaagcccagagtagagcactagtacaaaccatagtacacaaattccattctggggacaaaataggaggttacagggagaatggtgggaagtctcagccacccaccactttataagacaagcattatagtattgtactccaaggagtcttacttcccatatccctatttccttagatctaggttggacatgtgattggcttggatcaacaaaatggaacaaatgtacatttttttctagttccagattctatgcctttagagactgtgaagtgtctactaccatcctgaaaccatgctatcaccttgctgtgaaacctggtagcacattccagaggacacaacacactgtggggaataacaggtgtccctgtgtagagccagcatcagcagctagctaggtgagtggctctttagagtcaacaccaggggcagatatgtgctgtctccttaggctcttgagcctcacatgagccgtcagatgacttgagcacatgaatgtttgcaggcaaggccatcaggagtccctcctagtatcctgaaagtatatagttgctgtctttaagtcgctaggttttgatgagcattttttatgcagccaattcatacccaaagattaaccctagtgactatttcttgctatagcaagagcctaaaagaaagttggaatgtgttgacaaagaagcagcttagttaggttcagtcgttcagaaagagaagccacaatctcagctaacatcttggagcttacgttaaatgaagaacacagccagtgtggtggctcatccctgtaactccagaatttaggagaccaagacaggaggattgctttgagttcaaggccagtgcaggcaacatagtgagctccaagctagctagcctttttacaatgtgatagtcttgtctaacaacaacaacaaaaagaacacaatgttcagcaatgattcagagcttcagaaaggagagctagtagttctgtcccaagaacgatggataagaaatggaagatctgatcctccttctgttgtctcattttctgaccttgaaacactctctggcctcttggtgccccatttcttcagggatagtataaggcccgatctactccttactcatcattcacgaagctgggtagccttgttgtgggggggggggggacgacgcattttaacaccccactcatttagtacaatttagtttttgaaaagtcattgcttttgaaaagattgctcttataatctgaaagctgcattcagaggctgaaatgtgccctcctggtgaagttttaatcttttgtgctttaaagataagtcatttgccttgaaatagctctttcctattaaacatgatcacaacaacccaattttggtggccttaggtgatgatagtgggggatggcagtgtgtattcacggttatttggtctagggtattgaacccagggctgtctgtaggtcaggaaagcacatcttcacttaaccacactcagccttgagacttctatttgttcacgtggacccatttgcgtatcataacatatgtatctttttcatctaaatataactacataaagattcagtggcgtgactcagttggtaaaactattgccacataaacctggtgatgtgagctcaacatctggaacccatataaacaaatatgggttcctttgaaagcaaagacccaacactccaccattgtgctctgacccttcataggctcactgtggcgcatgcgccccgaaccaataacgaatgctaatagaaacagccatgtaaaagagctgggattcagacactgttgtggatgccaagaagtacatgctgaaaggagcctgatatggctgtctcctgagaggtcctgccaaagccttacaaatacagaggtggatgctcgaagccaaccattggacggagttagagaaaggaccgaaggaactgaaggggattgcaaccccacaggaaaaacaagatcaaccaaccagtccttcaagagtaaatacttcgatgtaaatacttcgatggattcttgcctcacagtaagatctgaagactgcacaaacttgtacatatggtttgcttccttccttccttcttagcttttagactctcttcattcactgctttatccacagaaaactatttctagaaaacgatgcctgaatgtttttaaatggctcttgctctgtgactgctgcctaaaacccaatatcccttgtttcctcccttctttctatgagtgttatccgggaccctctgtagcctacctgtagccttcaggcccacctgcagaatccctgagcactatgctgccctacctatagaatcttgacttttttcaccttgctattcatgattctctagttactatatatcaatttgttctgtgtacacctttagaatgtaagttgcattaagtcagggattttttttttgtacttgtttttttttgtttttcagatgcaatctcaatcctaacacagataagttcagtatcaataggttaacagttatgtttagtgcctttataaagtacacagggaaatgcattttcaaaattccccagtggaatctgatgaagccatactcagtgtcttcactcctaaaaactagtttaaggaaacactggtccagggaatgtatagggaagtggaaaacatttttgatctaacactatctcctatctggctgtgtttttcagactctggtgtacattgatggccattacctgggggtgttttctaaacatgttgaatgttgatatctgtctcaacttgagaaagttcaattgtgagttgtttatcctttccatagtattatctactgttggtgatcaattggaacataggaattctttagtaactctagatggttttcctgttaacatcttgtggcttgtattttttttttttttttcgagatagcatttctctgtttagccctggctgtcctgaactccctctgtagatcaggctggcctcaaactcagagatctgcctgcctctgcctcctgagttgtggaccaccactgctcagttttatttttttcatctacaaaataaaaggttttcagtccccacttctttgggattgaaggccatcagaggatatacaatctcacagagtaagaactactgaattcttggccaaggagacagccattattgaactagctggaccacagcctataagccactttaacaaattccctttttaatgtcaattctgttcatccagagaaccttaatacagagcaccgactcttcatggtgatgtgtgggtgtctatgtgcatgtgtgaacttcacagtgcccccaaataagagctgggtatccactttttattgtagtgaagtcagaatttggtgatcttgaccttgtttttccttttgtgcagtcttgatacatagctgaggctgtccttgcatttgtgcctaagcttcccaagtgctggagattacaggtcttggccaacaaaccagcttgtaaatggaattttaggacagtcctgaaacctagtcaacatgtgtctggtgtgaggatagagactgatgcttcttttaaattttttttttaatcgttttggtatggcttgttaagcagcagaactctgagatcctccccactgagtttttacattattttatgtatttgcttgtacattcagttttacaaaggacaccaggaaaatgttaaacagtagcaactcttggaaacatccagattaagcattctcacagttctgtaaaactgtgaccttgtgggagctccaactgtgaccttgtggaagctccaactgtgaccttgtggaagctccaactgtgaccttgtggaagctccgactgtgaccttgtggaagctccaactgtgaccttgtggaagctccaactgtgaccttgtggaagctccaactgtgaccttgtggaagctccgacctatccaggctctttagacatacgacttggagcattgtctacaacatcctttaagtatgaaaatcatgatatatatacttgaaccaataatatgttatttgtttccatatagttctgttgggcaatatacttttgcttttttccataaatagcaaattcaggaaactattgagaggtaagatatactgaaaacatagaacatagaacataaaagccaaaactgtttcagaacatagacgccaaagctgcctacctcattattacagagtaatatgctttgaattaatctacttaacaatgagtttctttccaagaggaactaaaatttcattatcctctagaatatttcactgacctccagccccaagcaggcattggggattattctgaattacaaatccttcaaaaaagtcaattacaaatttagataactagtgatttacacattttatattcttttaaagaaaaagttttataagcataagggtttaaagctcagattttttgggggggggtgtcacgaaacatgtatcattgagagagctactgaatctaattgtgaggagtgttcagagccagatatgtagtagatgcttaatgcatgccagcatatactctagggaatggttacatgagtatagcaagtttttatctttttatttttaatttttatgagtactggtattttgtcagcatgtatgtttatgtaccacaaatatgtattgcctgcctgtgtatgctgggaatcaaacccagggcctgctcggggagagcagccaatgtttttaaccatgaaccatctctccagcctcagcaaaagtctaatatatatatttatttatttttttctgtgagatggttcccttttgtagccttggctgggctggaactcactgtgtagaccatttagcaattgatctgcctttgcctctagtgctgccttaagagcttggaccatcacacccatagttgattttatccttaatcaactataatctttgagaagtgacttaggagttgctgaaacctatgctctccattgaactgtgtgttcttgttgcagtttctcaaggctgcctgtgggtttgtgagaaagtggtgccatttttattgtgggagctctgtgctaggggaggaagtgagaggatcagctgagtctgtcttgggtggagggagggccaggaagggcagggacagagggacagccctgtgcagtagcttctgctttttagagtgcctgcttctctcttctcttctcttctcttctctctctctctctctctctctctctctctctctctcctccctactcttggcatgcaagtgtgttctattgaacatagttttttttttttttcataccatnnnnnnnnnnnnnnnnnnnnnnnnnnnnnnnnnnnnnnnnnnnnnnnnnnnnnnnnnnnnnnnnnnnnnnnnnnnnnnnnnnnnnnnnnnnnnnnnnnnnnnnnnnnnnnnnnnnnnnnnnnnnnnnnnnnnnnnnnnnnnnnnnnnnnnnnnnnnnnnnnnnnnnnnnnnnnnnnnnnnnnnnnnnnnnnnnnnnnnnnnnnnnnnnnaacctcccaaaatgtcactgagttgtttttgtagcccaggtgaaactgttagaactaatattcatttgtgagccgttaatcagttggagatgtcttctggtttggggatagggtgcatgagtctgtctacctctcctctcagtgttggtcagccccgagaacccacctagggcacacccctacagggcctggtctcttagtgtttgggacctctttaaggaatgtgtatataaataattctgagcatccctcttagtcctttttatgagggcaaatggttgagaattcagggagtggcttaggtcccccaccccaccccaccccacccagatccctggccacaactttgctctattatattgtttgtttttcaaggcaaggtttctgtgtagctcaggctgaccttgaactcacagattgcctgagattcctgaatggtgggattaaaggtgtgcttcacctctaggctgctcaatgttcttaacatggcttgttatttattcttaaacttttctctatgctgtttctcggtattatccttaaaaagaaaaagaagtgtgtttttgatatatacattttctattttccacagtatttgcttatatgattctctaacatgctagaatatactctgctgttcccatttcttcaatctgttttggagggttacaatcatactacttaaacataaaatacttctggttgaagcctcctagggtcaagattgcctaaattgaaatccagtttggttattctctagtgagttttattacttgtaaacgggggttaaaattatcactcaccatgagattaaataacaggtaattattttcaatagaaaattgatgaaaagaaatactgatcacagatctatttgcgactgtacttgggcaatttatttatgaccccattttatcctctatgaggcaaggatcctagttttattgttcagattgttaaattctggctaggaagcttaaccaactaatttcaaggtcacacaattagcctccagcttgtttggtggcaaagcacaaccctccctttcaggttttgttttaaggttccccttcaccagtgtatggttaactcatcttagttatataaaagccaagtgcaatttaaagaaaagggttaaggaaaaaatgaaatatctgtggaacttaactatgtatggctattatcagcatgaaaagaggtttatttacaagttacttttaaaaagaccacctcgtgtttctggatcccaatttaaacacctctaaagtacgaaggttgatcgccaagttgcctgcgactgggaaccactctcttggaagcctcggacacctttagttcgcccttttttctctctccttgatcctgctcgatcactctctccgttccttctcaactgcatacttgctctaaccacggggttcggaacatctgagttccacgtgatcgcgggactgaagggcaaaggtggccttactgaaggatcctgaggaattagaagaagccaggtctccctcggagcaccaaaagacccagccctacagaaacccggaagacgtggagcgaccagcgggaggagggtgtggccgagagaccattggtcggccgggaggcggtgcttgtgctgacagtaggggaggatccagggaagctgcgagctcagtggcgctgtgttccgccccagaggcgtgctagtgggcgtggtgacgtcgcgtgacgccacaaggggcggggcgcggcttaataaagccggcctgagggagcgttcgccagttgctgcttgggacgcgggctgcgcggttggtgaacagccttgccgttttgctgtcacgtaccttccctgagcctgggacggagggggcgcgcgcgtgtgcgtgtgttgtgtgagggacagcgggactcgggcagggccgtctcctgatcccttttcccttagcggaggcggcagtgcgcacgctggtttgctcgccgcccacttgggagcgggctcagggtgcggagtgcgtcttcggttttgttttttggtttttttgttttttttgaacttgtgagagtctttttcccctcccttttccatttttattttcttttggctccgtgcctctagggctggtttacccggcccctgaattaccgcttcctgaccccggtcgccaatcttgccccaggttgctccccggctctgcccctgcccctccccgagggtgggaagccttgcctagtgggtctctgaagcgtagccgcacctgcctcagtatgcacggggtcaacgaccctccactttttataaaagacattaaggccggactgaaaaacttaaatgtcgtctttattgtcctggagataggtaagtgaggtccgcagcccgccccacaccctcgagagctcggacctcttccccgcccgcgaccccacgtgctcctggcccagactcctacccggggacagaagtcagtcacgtagcgagccagaggagggtgaaagagctccctcgaatgaactccttatctaacacacctttccttctcccctttttgatttttaaatcttcacaggacgagtgaccaaaaccaaagacggccatgaagtgagatcctgcaaagtagctgatagaacgggaagcatcactatttctgtgtgggatgagatcggagggctcatacagacaggggatattattcggttgaccagagggtaggtgtgcataaattggggtaggtgtgggtttggccgacttcggggttctgaagttgtttggctcttccatgggccacttcaagaagggagctgttttagtggacctcactgggagcagctcaccttcacagctaatttgttttaggtagggatttaactcccctccaattttaaaggttaattttatttttgagaataccgtgtggaagtcagtgagcatttatcagtgaggctgataaaagatcacattaccctttccaccctttcttggagactgggtttttctgtgtagccctggttgtcctggaacaattctatagactagtctgtcctcgaactcacagagatatacctggaaatcagttctgtgtgccacaccagttggacacatttcctttttaatcagttcgtgtatgaagtataatgtcttccacccctttccttttttggtacctttttttgtactcaatactcatcgttgtgatatggacatgaatgaatatctggaatactcattcttgaaaatgatttcatctgtaagatcagagtttcacaaaacccaaaataatacacagtggcagaagttaatctttgattcattcagagtatttagttggttatggagttggaatactttttttcatagacttgaaaatcttaccaaatgttggccttaagaaaagttcaggaaagaatcttaaaagtagaatatggaagcttctgtgattgggagaattgtaataattttattggtagccatcagaaaaatagttgacaattgctgctgagctaagagaatggtagaagtattgagtctttgggcaggagttctttgatcctatctcacaggccttacaacattttcaggaagtgaggtaaggtatcatcaaagcaggaagtgagagtcagaatttaggcatcttattctcagacattgagtcattgtgacactaaattacatctttttaacgtccatgtcttttcccccccaaaaatcacttcttttggaggttatggggagaactacaatactaatactaatcataatatatgttttaatgaagttacccaccttggtagttgtacaaagaaacattgaaaaagccagactttggtctgattctgctaatctagatttaatgatgtcattcacatttaaaattgctcacactaaacaattggtttcattctgttgatattaaaagttgcaaaatttggggaaaccagcagggcaagaagattagtggtctatcttttttatagctgctttagaaagtgccaaactttgaggagcttgagaactgctgtctgcagaagtagacatagtactgttatatcatccttggccatgtcagtaacacagacaatgctggtgtgttggctttatgtaccttgtggctgaaaggcaatacaaatactgaatttttactattagaagctcctccttagaatacactttgaattctatttctttgagtgtgtcttttgtccccttcctaggctcctctcctccttaaccaagcttcacacaggtgttaatacccatgccagtcttcagagagtagaaaacatgtacgttcttctaactgtaatggagagaattttacagatgtttttttttttctttaaagtttttaaagtttattttatatatgtgagcacactgtagctgtcttcagacataccagatgatggcatcgaatcccaattcagatggtcgtgagccaccatgtgttgctgggaattgaactcaggacctctgaaagagcagttcggtattcttaactgttgagccccttacagatatttcttctgttgaaatagtctgttttaaagtaattttaaggtgaactttagttaaccaatcaaaccaattcttcactaaaaaaaaacccatcttttgttaactgctgataaagtcattaatcatctagaaataacaataaatatgtactttaccagaacactacttctttccactcattctccttgtacataagctcaaatttgatttcatgtttcagttttctcagttctgggattcaaaatgtgtgttaccatgcctggtcaagattttatcaaactatgcattccagttcctcctgaggctgagacaggaagatggcaaggttgggggctacttggctacagagcaaccaacctgggcagtttagggagatgcctaaaaatcaggtttaaaatcaagttctaggaatataacttagtgacagagtgcttgcctagtatgttcaaggcctgagatccatctctagcagtaaaaaaaaaatttttttcctagggttgttatttagatgattatgtctttttttttctttttccaattttttattagatattttcttcatttagatttcaaatgctatcccaaaagtcccctataccctcccccctgccctgctctcctacccacccacttccacttcttggccctggtgttcccctgtactggggcatataatgtttgaaataccaaggggcctctcttcccaatgatgcccgactaggccatcttctgctacatatgcagcttgagacacgagcttttgggggtactggttggttcatattgttgttcctcctatagggttgcagagcccttcagctccttggttactttctctggctcctcccttgggggccctgtgatccattcaatagctgactgtgagcatccacttctgtgtttgccaggcactggcatagcctcacaagagacagctatgatgatgtcttaatgtggcagtagaattttctttgtataatttcttattagagttacagttacagtgactgtatttgacttgacatggtgagtaggcccatgtataaaagtatacattccctctaggtatgcatcaatgtggaaaggatgcctgacactttatactggaagaggtggtgaacttcaaaaaattggagagtaagtattaaagtgcattttgtttaattaaatttcaaataatgtctacaaaataattggtaagtatgaactatatataagccactaattttgcctttggagacttggctttatgccataggtaggtaactgttttaaacactatcaggtctgctccctttgagaaggtaagcttttcctagcagacctgtgtttagaccagccccagtggggtcctgtttaactttagaaaaatgtgtttttcaggtgtcattcgaagtacacgctcttgatttactaaaatagaatctagagatgggtttcaatctatagcttaaatattcattgtctctatggatgaatttgtattagagttaaatggactttcaacagtgacagttgaagccttctgtttgtcctattctatgtacagttcaagcagccacagctagtgtatgccacctggtaattaatgacttcctccccgacctgcaggaacatatgggagtgtaaaggtgctttggtctccatgctggcttagctatctgtgtttcacccataatgattcagattgttagtctagactttttggttgctgatgcttaggtatatcttagtgcccattagattggaggatatttaaaaagagaagtcacaaatagaactgagaagagagcgagagagagagagagagagagagagagagagagagagggagagagagagggagagaggaagaagaaggaggaggaggaagggaggggaggggaggagaggagagagagagatgaattgtgtcttggttaatatgaaagggaaaaagtgtagtctgattaaacatcagaatttgggttaccacttcaccctcatcaggaaggtgattgttgggactcctgctgtaagtacaaatgtaatgctctttagagtaatgtgttatgaaggtctttggggcagaattgtaggatctggctagatagtcatggatacagagattctacaataacggaggtcaggtaagtgaagaaccacaggaaattactcatttcctcatggctgtgttctttgtcagggtcaatttaagactttcccaaactggatctagttctttttagaatagaagagctatgaatgttcttatatgtgaacaggatatcaagttgtgctcttagcctataagaagtcctagcccaatatctttcttaatcattgagaattctttacctttgatgcttatctttgcagattcacagtgattgggcaaaagagggattcgatgaaagaatcaagtagattggtgctattttgtttgggatctagttattttggaaattttacaagttaattagttaacatgctactgttaaggagattttttgacacttaaggtttttattcttgtaaggagattatgcaaaaaggttcagagatcatttaatttgtcctttattttctttcagattttgtatggtgtattcagaagtgccaaatttcagtgagccaaacccagattatagaggacagcagaatagaggggtaattaatctaaaaatatgttatacttttgtgattggtgtagttttatgatagggttaagttgactctggaccatagttctgtcagtagggtaagcgtctgatgttcacagtgaaatgaaaagaattataaggtattcttgagcactggggatgtagccgaactgatggctgcttgtctagcatgcataaagctctaggctcagctaccaagtactgccaaagacaaacatagtggggcacgtgggaagtagtttctcaggaggttggaaataggataagaaattcaaggtcatcctgggttacatacaagtttgaggcctacttgaggtacatgagaccctatcaaaaaagaaatctttaaagttgcttttattacattctgtgagtacatacataatttgtgacacatgctgtttagatactttgcaaactgaagcaaatatcaggcagtactgagtataataaacactataccagacttgagaaagatttctgaatactttaacattgaatggatttggacaaacctttaaatattattgataatcatttttaaaactcttgaaattaaaaaaaaaatatatatatattttactttataaatgtgctacttttgtcttttaggtacaaaatgaacagaaggataaactgagcaccaatacatttggaccagtgggtaagacatggagacattatatgagaaacataaataaaaaaaaatctcttaatgtataatttagtgttaaagagaaactcctagtaaacaagtatgcacaaataaaagattttgggggagatagaagatacttgtacatgccggtatattgagcactttcttatttaaacactggaacctattatgctgaacactgattagtaaccagactaattttagtgaccgtctgatgagatcttttttttttagttaaccaatgtctatggtgtaatggttatgtataatgtatgtgtgcagaattattggttgttttggcacaccactatccagacaaatggtgccatagagtaggcgtcagtgaataccttaaccttctacatgttcttagttagctgccgttttaaacagggcagcctgtcttccccagacccctcaccagcgatcttggagcaccaaaaagtcttttgtctttaagtaacctaggatatgtcttttgagatgtatcttgctgtaatcggagttgatttgggtagccgaaggcttatttgatcagctcacattatggaaaacctgcctgccaatagcttgattacattgaaacattaattgtatttgagtcaaacaccagtattcaaacatttctctgcaattaattttttttttggtgtgtttgtttttatactttattcttaatcttaaggctcagattgtttttctctcttctattcattcagtaccaagtagtgtatttgttaatacacttgtccagcccagagctcacatgtttgcgttatagaataaaagtgctggtttttcctgggatttgtaaatattcatagtgtgtggatgaactttaatgattgtgtgtctgtagcataatatggaccaattctgaaaatgattttttgtgttcttaggaaatggtgatcagactggccctgaatctaggggatatcatcttccatatggcagaagcaatggtccgggacctatcagtccacagctaccaggaacacctagtagtcaaacagtcaggaccacaataagtaacgccagagatccgaggagagcctttaaaagatgatctaagccaaagagacacatgtagtttttaaactacatgacctacttgaacacttagtgcacttttatttattcttaactgtgaaaactttgtctcttacgggtttccttttatatttttggtttgttgaaaagagtggttggtttttactgaaaaaactgttacactgctcagttacatcctattgaagaataggaactctgaaagcaggaacatttattttttgagcaagaacttactgggtatcacttgaaaacctgtccctgtttcgagggtgagttacttaagacaccagcttatatatagcctctgtgagtctggcttctgcataaactttgtaatgtttgtcataatgtttaatggaacttgtcttaaacttgaatattgccacctgaagcaataaccaccccaagccagaaacttggacagcattgtcaacatttttgagtattcctgatctaggaatggcttgactccctagagtgtctgcctgccataaggattttttcacagacagaatcagaatcatcctaaactcttgtttattgaccagataaccaaattcttcatcagaattatggaataaaatatgtaatataacaagtaatttttagaagaaaacggtttaagatgatgctcttaacatttgttgcaaacattgaagtttacattgaagaaaaatttacaactgagtccctgaatgctttatttttgaagttaccatgttaaatattgaagtgtaattggagggattgaagagagctataacacctttattggacagtggtctcattgatactagttgtatttttgaggcagggtctttctctgtgcagccctggttggttggaacttgttatatatatatatatatcaggtgggtctctgaactatagattgacctgcctctctcttcctggagctgggattaaagttgtgtagcaccacacaaggctaatctgattatttttaaaaaaatactcatggtagttactatagcaaatacaaatcaaattaaattcatatagccatgtgactaccagttgcaagtagtcgggtagaagtaggcatttcctttcttccaggaatgtgtgtgtttaaagtttttgaacaagtcacatagccttactagcaaaagttaaatggctcaagaagtgattatacttctgttgaggtgggatttgtgtgatggaacatcacttacagtgggtgattggtaatttttttcattgttagtatttgtctctccttaaatattgtctcttgagtaaaacttgctgtaatgatgacatatctacctacttatttttactttcagtaaacatggagagcccagtccattttactgaagttgtattcatcttcagcttgactgctccctaactctgtacctgtcatttctccttacctcatattgtaaaataagtaagtttctgttcaacttgtatagcatttgaatataatttgtgtcagattttgatctaattcattttaacagattttcagtaagcactgcattaggctctgtgtggagattatcatagcattttgagaagtcacaaggaatttggtttataggtacagggctttgacatttgtcattgttcatatattaataattatagctaatttggccttatgattttttgtttacatttctgaatgtttcaaaaaagttaagggttaagatagcttgtgttttgtgattatagatgttttgaataaaaataaatgacaaactaatcttaaaaatttaagatataggagtaacagaacttttatttgtggtacaatatggtgttaaaaggtgattctaaagaaaggatttgaactttgatagattttaatatggtgaggtatatctcagtgggccctcagttctgacttcgttttcatacctatgatgctgctaggcaagttgtgatgagggaaacaagtggtaaacctttgtggatttaggactttgactaggtaatgacaataacttctggtgaatgatcagtcaaatcttgtggtgtgatcaaaatgttaatagaggaaatgccgagctttgagatactgggatttaatcaaaaaatagcctaggattttacttacaactgatacttgtctcagtaattttacctgttctgtattaacaagtttcttttttcttaaggaaaacttctaaaaccaaagcaagtgaaatccaaacagtaatgaataattgcctttccagtctgcttggataccactcatcaagaagttactgaaaaaagtgtcaaccttcctcctctctggtgtcttcagttatcaacgatgacaaatttcaataagacccagtgaaacacaaaacataatatagaaatgcacttctaggattgggtccccattactgtttctaggcacagttctggattagaacaaacacatgatcagactagccttgtcccttatttttctggccaggttcacagggagttgccacaggatagaaagtaaaatgtaaagtctaaatgcccaaaggctgaagtttgccttgcagaagtacttttaaagaaaaaaaaagtttcatgtatttactatgtatacagtagtctgtgtgtatgtatgcttgtgtgttagaagagggcaccagatctcatagatggttatgagccactatgtggttgctgggattgaactcaggacctctggaagaacggctactgctcttaacccctgagccatcacagaagtatagtttcccttactttaccaactctgttttgctttttcttagtagtcttaggaactgtgttaaacatgaagagtgattaatttttaaaggatagtttgaaggttaactcactccttttttatttttttaaacttgagattacatcccgagtgttctttacagtcagtggagttgctgaaatgcttcccctattaggtatgctagtgagcataatggctgtttgcttgaagccaatttaggttgtgtgtgactcgtgaggttctgatgactgtgaaaagcactggaaacactttcccaaacaggcatgtgccaagctagctctgacctcactgaggtcttgcctctctttgtttaaagcctgatacttagttctctttctcttacccaatgaaagtggtagatacagagagatacttgggcatgatgagatccttgtgtgctgaaaccctagacattgattacaagtgggagtgattaaacagccccacatctcatggttgtaatgattaacacttcaggcatgtttctcttaacacctaattgtgacctttggaaatgcactatcactgatgtattattatatcccaaggaagaagctagaagattgttttctaggtatatttaagtttgctagatgccttgaggtttgctttattgggaatatactagaatttggatcagaaagctttagccaaattatgccaagttttgttatgcacaaagacttaatatttctgaaaacacaaatcagactcaagatcaagtccattaagttactaataagcatttttccacactaacattaggcccaaaagtactactaagacctagtttttacctttgtgaggtgttcaatataacatttcaaccagtaggtcttttagccatttgaagagtaaaagtatagaatccaacactttatgatataccccaaacattaggaagtgggtgacagttctttgttgttctgtagtagcctagttcggcagatttattgacacacccatactgaagggctataggcatattttaaaaagcggactgtttcaagctagaaattaaagattctatgccttctaagattaaaaacatctggatccaagctaggacagcttgttcacaaacgatggagtaatcttgaaaatctggttttaagtcccatacatgaagcttttcagaagggtggattgccactcttatctggaagggaacttagaacttgcatcaaacactctggagagctttgtctactgttcttgctgtctctcttttacaaggaggttattttcgaattctctgttcctttcccgtaaatctagaatgtactaaattgtgttgagcagtggaaaatgtactagaagaatgtccaaagcacagagtaactgaagcaagtgtttctgagtagaaataattagcccctctacataggagtgctggaaattttgaattaggttaaagtagaatcacagaaattagaagagcaaagctggggctggagagatggctcagctgttaagagtgctgactactcttccagaagtcccgagttcaattcccagcaatcacatgggggctcacaaccatctgtaatggggtttgataccttcagctacagtgtaccccatacaaagaataattttcaaatagtttaaaaaaaggtaaagccgagattgtatcttttccaccctgaccattatgttctgtggcttagcccaggaagtggatgtttgtgtcttctgtcagctcaatgaaaaagatgaaatgtcaaagtggggttggaagcattgacgttactgaatgcacacagcacacatcttcagatttcaatcccaccttaggcacagttcccacatgagtttgaaatatttagcactaagacttcaagttgctggactatttggacaaaagtcagcactagggccatctactggtaattactgtgtagtttctgtggctgaatctggtttagccagtttaaggtggagaaagtccattacccaacaggataaatttgatttgatttatgaaggaaatagatgacattaagaaatgatcataggaaattgggaaatctccttatgaagactgccaagattgttttttcaagatttaaaaaaaatggacttttacctgaatgtttagatgtgtaccatatgtgttcctggtgactgtggaggtcagaaaagggcagcatataccttgcaactggagttgagatatttgtgagccgccatttgggtgctgggaattgaacgcaggctttctgtaagagcagcaggtgctcttgagtcttctccctaacctgtactaatactgtcagtgttagtgaaaacttgctaaaaatggggttttggtgaaaatgaagtagaacatgaagttcttaggaactatttcatcaggttttttttttttttaaatgccaaatgactgttgctatttttgtagttatatgaactttgcatatcataactcaaatgtaagaatgtaaagtgaaaacaattttgagctggaaagatcttgatttgagtcctgtatctgttattgtactagcttcatggctgtgagtctatcagaggataaagcactatttgaggaatctgagccagtgtatacaaagcacgtccatgttcaaggctcaacaaatattaaaccctttataacgatcagaaataagatgaatactgtcatttctccataccacttggagataattcagaaaaaggtaattgaataacaagaaatttatgagtttaaaaaaatattggaggtgagttacatgtagtgtgggctgggcttgagctgttgatcttccggacacagacaaggcaagaactaccgtgcccaactccaattgaaaacttctaattacaagtttttgtacattttcttggtgcagaaaagcatgtatgttgctgatctgctgtgacagtacatagggttggctttcattacaaagctctgaccaactagtcaaatggatcacagcttttttctcctttgcccaagaggggcctcaatctgtctatgaaagtgtagccgaagagggacctcttgtgggcaaacgtttgggctagaggacaaggtcagtgggtcagaggataggcagcaggtacactagaaggcattcctacttagatatcatgatgtgtatttgcaggtgtagagcaatttgcttataactacagccttgaataatgttttcaacagtttttgaaaaatattgaactttacagacacctgtgttcatttaaattttgtattagcatccaactttccatctatcagtcaatccatctggaaccatttcaaacagatttttcttgaatattccaacatggctgttcattggaattttcaagtttcagggtaaatttatatacaacgaaatgccctattttaggtgcactttgtggcttttagcaaatgcctcacactcacgaaataccataaaaattcaaaatagtcacttgtctagaaatttctgttatgcttcttaaaaccatatgaaactaaagttcctactagccatcaataaatgttagaagtttatttcaaagttttagatgtcttcctggcagttcgtttttgttttgtttttgttttgtttggggggagggttaggcagtgctgttctacagactagaggatctgcagttttggggcagatggaggggtggcttcagggggcacaccattctaccctcagggatgacagtcttctactctgctatgatagcaccaactctggtatgggaagttgagagcagagcattatctaggaacttagagtgttttcgggacaagtgctcagctcttgagatttttttttttttttttttttgttctggctgtcctagaactcactttgtagaccaggctggcctcgaactcagaaatctgcctgcctctgcctcccaagtgctgggactaaaggcatacaccaccactgcttggcttccccgagcttttttattgtgttattgttttatgtataagccaactccaaatgccttctgctgttttgagttttcatagtactgataggttggattcagttggcatacctagaatatgcacattgcttgcatagcaaagaccctctgtgtgtgctcacaacatacaacacagtttcatttccaattctgtttctacattgatcacattcttcatttgcatacactcttaccacttgggtattcaggattttctcttttagtagacggatttattgagcactgacatgccatgtccgaggctagccaggtccctgtgttgtgctattttataaaatgatgtgatggatgctttctcttcaatataaggatagaataatttgcccaagatcacacaagaaggaagcgacaaaactcaacataaaaatccctgtacttttaactgctgagtgatattgatgcatcgacgctcttgctggcatcctggatagggattcaagagagacaggattgctgttataaaaatctataggcagaggagaagatgaagagcaaagcacagactttaacattttgcttgggattaatcatactttaaatgtcaactaatacagatctgactaatcaaatccacagccaagtggcacatcagcgagggaaatatggactttgagcattagtctagcaccattcccaaacaaccccctacacaaactttaaaataaagccttaaactcccccagtgtttggagaagaaatggctcaaaaatctctaagcattatacaaagactgatacatttgactacatttatataatacaaattaaaaccaaatgaaaaaccagaaagtgtattttatttcatactgaaaaactgcgtgttcctaacatgtacaaagcatataggaggcatatacagtgttttcaacttcacatgcaattgagttttaaaatactgaactactattcacatttagagacatctatgaaagtttgacatgctttcttggtgattgagggagcaggttctttcactcatagtttacgcttgaatttgcctttgggcagggctcttaaatctttccctcttggagtgttttgttttgacttttactggggtttttatacccacctccctactacccttccaacccttcagcagtaggtaggagaaaaaggaggtagtaagggaaaaagggctctcagtgccatcttccttgaaactcctgcatcatgagagcgaagtggcggaagaagagaatgcacaggctgaagcgcaagagaagaaagatgaggcagaggtccaaataaaccagcttgtgcacccacgaagcctgcaggagcagaagtaagggatgctgaaggctgggacaccggaacaagctgttggactgcatgctgctcttggtaataattctcagtagacctggaatgtcacctcaccaagatcacctgggaaattgactgcctttcttacaaccaaaacagtcctgctggccctctgcccttgacttttgacatcctgcactagttctgttctctcttgtggccaaatgtaactcgtgtacaataaatcctcttgttgtcaggtgagtaaataaataataaaaaggaaaaggggcataaatcttcttaaactacttccggttgatcaggggtgtcaggttcctaggggcaagtccagtctttgtcctaaggatatctccaacttttgtcaaaccacaacaacctgcgactaggagcagcagggaggccagcagctgctacagcccctctcaggactcttctatttataccctttccagagtcccccaaactgaagtatatacagcaaaaatcatgcccctgctagggcatgagacaaataattacctgctgtgaagcagcctcttattccatacctgggattaaaagaaaaacatattctcataattggctttttaaagaaaccaaaattcccactacaccctcttgacagtgcatcttctgcattgacttctgcttgctgaagtgacctgctttgaccaaaaggataaacttgacaaccaccaaagactgaaaagtactttcatattgtgcttcctttattcttagagcaccatgctttccaatgtgggttatgagagaccatttgagaaacctcagtgacagcctgctaactagtagaaatgatgaatgtatggtttatccagatggagttgagttgccaaccatttggagtcccaagggtgaaaacaagggaaggatgtggctgattcatccagaagagctgatctggagaagtagtatgctatgcatagtgaaggctaacagaaaataagatacaacggcaaaaacatgacaagacgtgttcacctatattatttgtagactggaaatattcttgaggaatggttcatagagcacagagtatctatttagcagacttgccactgcatgtgagtagtttccatggagtaattttcaggatgtgaaaacaaaacccaaaacaaaaccagtacagaacagtgtatagtatgctgccccccccccctttttaaaaaagaatactgctatgtattcatttttaattttatttgaaaaattagaactggctgagtgattgctgagcattaatgaggccctgggttcaattccagcaccacaaaatgaaagagctgacagtgctttctcttaacagctggccagcacccaggaatgatttagtagagggaaaggtaatgctagactgcattctacaaagtgttggaactggaactatgttaatgttttgttttcacacattcttttttttggggggggggggttgggatgggagggtttcgagacagggtttctctgtatagccctggctgtcctggaactcactttgtagatcaggctggcctggaactcagaaatccgcctgcctctgcctcccaagtgctgagattaaaggcgtgcagtttccacacattctaaatgaagacaaaaactagttatagaatcacagtaaaagtaaaacgaagctatctatgttagcctcttaaaaatagaaatcatttaaagtattgtaaaaataaccatttgtctaatcattcttagtagggatgcatcaaggtaaaaagaagcgacattcatattagtaagtattcagaaactattatatatttcagataagttaaaatacagtttttgttaatatcaggaatcaaaacattcataaagatgctaagtagtctataagttgtaatcaggtgtacaattttcttgggaagtattatgatgcattttttttgaaaagaccaattttctagtccttgtctgtgtagtaatgagcacctagaaccaggattatagtttctaaatgacatttcctcttaagaaacaaggattccttggagctggaaacatctttttggacttaaaagaaaggaatcttttaaagactagtagctcatttcaaaaggacttacgggtcaattcagagagcttattccttgacaaaaatggaaaatataaattaagataattgcaatacatcgaaatttatgtgaaaaaatccatgaattaaaaaatcatagacatattttgcagaatgctaagacactcattgttctgaaaacaacagagtgcatttatatttcctcttgtgagacggagctgtcaatatagatactttcttcttcaccaccaattctacttgattaggaataagaatattaaaacttcactcttttgtggtctttaatgaactaatctaagaaatgattaccaatgtcttccaaactttggaaaggttgacgtggaactttctaagtggaccaaattggcaattcagcacatagtagggctggccttccataggcacagctttcaatctgtgggttctgcaactgtgaagtcatcgcaccatgaggagtgtgtgtctgaattgatcatggacagactttttcttgtattattccctagacaataaaatataataactatttacatagcgttgagaagtgtacgagttgccactgcatcagaacaatgaatacaaagtcgaataaactgaaaaggcaattcttcctaaaacagtaggagcagtaaggtcagaaggcaagtcaatgtccctgaagttggtgtgagaggcacagaaaatcataccagagtggaaactcaggaacagacaactcaatgggaattaatgcccagctggagaaagcctgctcaggaatcgatggaaagctggaggttcagcctaaagaaatcttagataaaaaacaaggagctcattcactgggatctcccagtcccttttattaattcttagagaatttcttacaatgtgttttgataatatttacctccatcccttgactaggtagaccttttagtagacttgttgttactgaataaaaagtctatgcctgaggatatctccatagaaacattgagaactgaaaaactctgggaaaagtggggagaacacataccccaaatagcagttcccttttaagcagtataactatgcatggtgggggtattaaaatgaaggtactgaaagatcacagtgtcattttgaagtttgggttgtttgtaagtatatttcaatctctgcagcagccactggggtgggggatggaggtctgagattcactgatgtgctgagaaagatgagaaagtaagagaacctttgggcctcctgtctgtattggtaaggtgctagtagtgatggctatcaccgtgcttttaacagggaaattcaaagtcaagctttactagttagcaataaggcattaatgaacaccgggcaagcagagactagcagagtaggaggtagaagggtgggtcttcctctaagatggaagtggaacagctgaggaaggaattagtccagaggagtcctctatcttttgaaggtcctcactctttccaaacacagaaattttattttgactcatgtgtatgggtatttctagtcacgtgtgtgtgaatgcagcatgcagattcttggagctggaatcacgggcagccggtgctgggaacagagtgtgtgtgctctggaagggcagcaagcgctcctaacctctgcgccacctccccagccaacagctg

SEQ ID NO: 16 - DNA, 2297 bp, Mus musculus
gttcgccagttgctgcttgggacgcgggctgcgcggacgagtgaccaaaaccaaagacggccatgaagtgagatcctgcaaagtagctgatagaacgggaagcatcactatttctgtgtgggatgagatcggagggctcatacagacaggggatattattcggttgaccagagggtatgcatcaatgtggaaaggatgcctgacactttatactggaagaggtggtgaacttcaaaaaattggagaattttgtatggtgtattcagaagtgccaaatttcagtgagccaaacccagattatagaggacagcagaatagaggggtacaaaatgaacagaaggataaactgagcaccaatacatttggaccagtgggaaatggtgatcagactggccctgaatctaggggatatcatcttccatatggcagaagcaatggtccgggacctatcagtccacagctaccaggaacacctagtagtcaaacagtcaggaccacaataagtaacgccagagatccgaggagagcctttaaaagatgatctaagccaaagagacacatgtagtttttaaactacatgacctacttgaacacttagtgcacttttatttattcttaactgtgaaaactttgtctcttacgggtttccttttatatttttggtttgttgaaaagagtggttggtttttactgaaaaaactgttacactgctcagttacatcctattgaagaataggaactctgaaagcaggaacatttattttttgagcaagaacttactgggtatcacttgaaaacctgtccctgtttcgagggtgagttacttaagacaccagcttatatatagcctctgtgagtctggcttctgcataaactttgtaatgtttgtcataatgtttaatggaacttgtcttaaacttgaatattgccacctgaagcaataaccaccccaagccagaaacttggacagcattgtcaacatttttgagtattcctgatctaggaatggcttgactccctagagtgtctgcctgccataaggattttttcacagacagaatcagaatcatcctaaactcttgtttattgaccagataaccaaattcttcatcagaattatggaataaaatatgtaatataacaagtaatttttagaagaaaacggtttaagatgatgctcttaacatttgttgcaaacattgaagtttacattgaagaaaaatttacaactgagtccctgaatgctttatttttgaagttaccatgttaaatattgaagtgtaattggagggattgaagagagctataacacctttattggacagtggtctcattgatactagttgtatttttgaggcagggtctttctctgtgcagccctggttggttggaacttgttatatatatatatatatcaggtgggtctctgaactatagattgacctgcctctctcttcctggagctgggattaaagttgtgtagcaccacacaaggctaatctgattatttttaaaaaaatactcatggtagttactatagcaaatacaaatcaaattaaattcatatagccatgtgactaccagttgcaagtagtcgggtagaagtaggcatttcctttcttccaggaatgtgtgtgtttaaagtttttgaacaagtcacatagccttactagcaaaagttaaatggctcaagaagtgattatacttctgttgaggtgggatttgtgtgatggaacatcacttacagtgggtgattggtaatttttttcattgttagtatttgtctctccttaaatattgtctcttgagtaaaacttgctgtaatgatgacatatctacctacttatttttactttcagtaaacatggagagcccagtccattttactgaagttgtattcatcttcagcttgactgctccctaactctgtacctgtcatttctccttacctcatattgtaaaataagtaagtttctgttcaacttgtatagcatttgaatataatttgtgtcagattttgatctaattcattttaacagattttcagtaagcactgcattaggctctgtgtggagattatcatagcattttgagaagtcacaaggaatttggtttataggtacagggctttgacatttgtcattgttcatatattaataattatagctaatttggccttatgattttttgtttacatttctgaatgtttcaaaaaagttaagggttaagatagcttgtgttttgtgattatagatgttttgaataaaaataaatgacaaactaatcttaaaaattta

SEQ ID NO: 17 - protein, 179 aa, Mus musculus
FASCCLGRGLRGRVTKTKDGHEVRSCKVADRTGSITISVWDEIGGLIQTGDIIRLTRGYASMWKGCLTLYTGRGGELQKIGEFCMVYSEVPNFSEPNPDYRGQQNRGVQNEQKDKLSTNTFGPVGNGDQTGPESRGYHLPYGRSNGPGPISPQLPGTPSSQTVRTTISNARDPRRAFKR

SEQ ID NO: 18 - DNA, 2845 bp, Mus musculus
gttcgccagttgctgcttgggacgcgggctgcgcggttggtgaacagccttgccgttttgctgtcacgtaccttccctgagcctgggacggagggggcgcgcgcgtgtgcgtgtgttgtgtgagggacagcgggactcgggcagggccgtctcctgatcccttttcccttagcggaggcggcagtgcgcacgctggtttgctcgccgcccacttgggagcgggctcagggtgcggagtgcgtcttcggttttgttttttggtttttttgttttttttgaacttgtgagagtctttttcccctcccttttccatttttattttcttttggctccgtgcctctagggctggtttacccggcccctgaattaccgcttcctgaccccggtcgccaatcttgccccaggttgctccccggctctgcccctgcccctccccgagggtgggaagccttgcctagtgggtctctgaagcgtagccgcacctgcctcagtatgcacggggtcaacgaccctccactttttataaaagacattaaggccggactgaaaaacttaaatgtcgtctttattgtcctggagataggacgagtgaccaaaaccaaagacggccatgaagtgagatcctgcaaagtagctgatagaacgggaagcatcactatttctgtgtgggatgagatcggagggctcatacagacaggggatattattcggttgaccagagggtatgcatcaatgtggaaaggatgcctgacactttatactggaagaggtggtgaacttcaaaaaattggagaattttgtatggtgtattcagaagtgccaaatttcagtgagccaaacccagattatagaggacagcagaatagaggggtacaaaatgaacagaaggataaactgagcaccaatacatttggaccagtgggaaatggtgatcagactggccctgaatctaggggatatcatcttccatatggcagaagcaatggtccgggacctatcagtccacagctaccaggaacacctagtagtcaaacagtcaggaccacaataagtaacgccagagatccgaggagagcctttaaaagatgatctaagccaaagagacacatgtagtttttaaactacatgacctacttgaacacttagtgcacttttatttattcttaactgtgaaaactttgtctcttacgggtttccttttatatttttggtttgttgaaaagagtggttggtttttactgaaaaaactgttacactgctcagttacatcctattgaagaataggaactctgaaagcaggaacatttattttttgagcaagaacttactgggtatcacttgaaaacctgtccctgtttcgagggtgagttacttaagacaccagcttatatatagcctctgtgagtctggcttctgcataaactttgtaatgtttgtcataatgtttaatggaacttgtcttaaacttgaatattgccacctgaagcaataaccaccccaagccagaaacttggacagcattgtcaacatttttgagtattcctgatctaggaatggcttgactccctagagtgtctgcctgccataaggattttttcacagacagaatcagaatcatcctaaactcttgtttattgaccagataaccaaattcttcatcagaattatggaataaaatatgtaatataacaagtaatttttagaagaaaacggtttaagatgatgctcttaacatttgttgcaaacattgaagtttacattgaagaaaaatttacaactgagtccctgaatgctttatttttgaagttaccatgttaaatattgaagtgtaattggagggattgaagagagctataacacctttattggacagtggtctcattgatactagttgtatttttgaggcagggtctttctctgtgcagccctggttggttggaacttgttatatatatatatatatcaggtgggtctctgaactatagattgacctgcctctctcttcctggagctgggattaaagttgtgtagcaccacacaaggctaatctgattatttttaaaaaaatactcatggtagttactatagcaaatacaaatcaaattaaattcatatagccatgtgactaccagttgcaagtagtcgggtagaagtaggcatttcctttcttccaggaatgtgtgtgtttaaagtttttgaacaagtcacatagccttactagcaaaagttaaatggctcaagaagtgattatacttctgttgaggtgggatttgtgtgatggaacatcacttacagtgggtgattggtaatttttttcattgttagtatttgtctctccttaaatattgtctcttgagtaaaacttgctgtaatgatgacatatctacctacttatttttactttcagtaaacatggagagcccagtccattttactgaagttgtattcatcttcagcttgactgctccctaactctgtacctgtcatttctccttacctcatattgtaaaataagtaagtttctgttcaacttgtatagcatttgaatataatttgtgtcagattttgatctaattcattttaacagattttcagtaagcactgcattaggctctgtgtggagattatcatagcattttgagaagtcacaaggaatttggtttataggtacagggctttgacatttgtcattgttcatatattaataattatagctaatttggccttatgattttttgtttacatttctgaatgtttcaaaaaagttaagggttaagatagcttgtgttttgtgattatagatgttttgaataaaaataaatgacaaactaatcttaaaaattta

SEQ ID NO: 19 - protein, 198 aa, Mus musculus
MHGVNDPPLFIKDIKAGLKNLNVVFIVLEIGRVTKTKDGHEVRSCKVADRTGSITISVWDEIGGLIQTGDIIRLTRGYASMWKGCLTLYTGRGGELQKIGEFCMVYSEVPNFSEPNPDYRGQQNRGVQNEQKDKLSTNTFGPVGNGDQTGPESRGYHLPYGRSNGPGPISPQLPGTPSSQTVRTTISNARDPRRAFKR

SEQ ID NO: 20 - DNA, 29481 bp, Homo sapiens
cccaagtagctgggactataggcatgtgccatcacgcccggctaatttttgtatttttagtagagacggggtttcaccatattggtcaggctggtcttgaaatcctgaccttgtgatctgcctgcctcggcctcccaaagtgctgggattacaggcgtgagtggccgtgcccggcctctttcattttatctcttctaaaattggtgtttcaaggaatattctatccattggatttaattataaatattaagagaaaaaaactacaagtggaaattctatacctgccccaaatatgtgagaaacaagttagacatttttgcatatgtaaagtatcagaaggtaccttcttcctcttttctttctggggaacttacttgaggaatcaccattctagcaaaatgaaaatcaaagcaaaactatgatttcaaggggatttaaaatatattaaaaacgtgaatgagtaatcaatccagtaaaatttaaaagacaggaatacaggatcatagcttggttcttgaatggggaacttgaatattataaagaaattggtatgtcccaaattagtgggacatacccttctttcaattccaaacaaaccctgagaaaagtctgtttttaaatcatgacaaaatagtctaggaaaataaggtaagcaagaatgattaaagaatgtttataaaaaaggggtctgaaggttggtatttgccttatcaattataaatttacaatagttagagcatgttaaatactaagaacagacagataaatcagataaaagtgataaactggaactcgagtttataaaatagaaaaaatagacaatattttaaaaaataaatctgagaaattgtttcttcaataaataacattggacaaataaagtaactttttgatgaatattttattagagctttgcatcacagcatacataagaggtaaatatttagtcataaagaattgaagaaggtatagaaaaaagtttatatcatctcatcatgaggaaggatttcctcaaacaaaaaagcaatggaagacatcctaggaaaagataataaatttgaccatataaatatacaaagtttctacactaaaaatacagataaaaggaaaaggcaaatcacaagtgggaaagatgtgtacaacaaatgttgcaaaaaccaggattactatcatttgtgaaaactcttgatactggtaaaatccaactctcagcctggtctgtgcctaaactctcacagatgaacgtgtctgaagaaaaatacaaaaccatgtgcgttggtcaactttaagttagctgttaacttccttcatgtgaaactttagttggcttctaaaattgtaataaatttccccatttaatacagtctcccacatccccaatgactatttctaacctcttcttacacttcaaacttccagcatctcctccccattctcactctaaactgatgatcttgtttatttcattgggaatagtagctatcagaaaagaccttccacacactcttaccatcatagcaactcagcctcctgttccagaaaatccctctacgctcctatccacctctccacagcagccctagctcccatcatctctcacctactcaagggcaagaatttgttttcagcaatttgacttttccctgtctctactgaatcatgccattcagcctagggtcatgttactattttttacattaaaaaaaatctcttttgtcccactttaccctcaagtgattagcccatttctctgctgtcctttgcaaaaaacctcctaggaggagctatatgcacttactttcacatttccaatttatgaacttctgttctctcttgaactcaacttatttagtctttcatccttcaccaacttcattgtcaaagtcaccaatgatcttcgtttttgctaaaccctgtaatcaatcctgtttcatctcacttgatcagcagcatttgacacaactgtcaccccctcttcccagaaacatttgattcacttggcatccaacacaccactcaccttgctgtgttcttcccatctcacttcttatgtctaaaatgatcctcctgatctttccacatcgcctaaactgctccacttgtattcctccccatttctgttaatgacaactccatcttaccagttgctcagacccaaaatctggaggtcatatttgactcatctcattctctcatgctccactgcagccagacagtggacctgtttgctctatcttctacatagattcagatgctgatcacattataccattgtcactgctaccaccccagtgcaagccaccactcatcacaagtggattaatatgatgcctcctgattttcctgcttccacccttgctccttttgctctccacccaacagtcagagtgactcttttaagtcaggttagcatgtcaagtctttgcttaaaacactccaatagattcctgtctcgaattaagaagccaagatcagcacaaaatcttcatatatgatacccctgccctctcccctggtccctgcatcttctaaactttctgcttactcactgcttcagctacagcagctttcttgctattcctggaaaaagccagagatacttgggtcttttcaatggccctccctatgtctggagtgccttatactagatacccacctggctccctccctccccttctttgtttctttactcaaatatcaccttccctcaccactttctacactcctacctgctaaatcctcatctcttcccctgctttatttttcactaatatatactacataattttacttatttattttattgtctatctctttagactgtaagctccatgaagtctgggatttttgtatttttttttttactgatgtagtcccagtgctggcatgtagtagtagttcaataaaattttgttgaataaattaatgaattatgtttaatgcatatatacaaagggaaaatggagtgcaaatctcttttgaaattcctaaaatgtaatttgataatacataccagaagtcttaaatatatacttaataatttcactcctagaaatatatcaatgcaggatttccctaactaatataaaggaaacattgctccagcatattaataggtatttggaaaacaaagaaaattatttaaaaaaaaatcttagcctggttttcagacttggttgcacattgtcattacttagggagttttggagttttaaaatatgttgatgactgcccaaaatctccttaagctgataagcaacttcagcaaagtctcaggatacaaaatcgatgtgcaaaaatcacaagcattcttatacaccaataacagacaaacagagagccaaatcatgagtgaactcccattcacaattgcttcaaagagaataaaatacctaggaatccaacttacaagggatgtgaaggacctcttcaaggagaactacaaaccactgctcaatgaaataaaagaggatacaaacaaatggaagagcattccatgctcatggataggaagaatcaatatcttgaaaatggccatactgctcaaggtaatttatagattcagtgccatccccatcaagctaccaatgtctttcttcacagaattggaaaaaactactttaaagttcatatggaaccaaaaaagagcctgcattgccaagtcaatcctaagccaaaagaacaaagctggaggcatcacgctacctgatttcaaactatactacaaggctacagtaaccaaaacagcatggtactggtaccaaaacagagatatagatcagtggaacagaacagagccctcagaaataataccacacatctacaactatctgatctgcgtcaaacctgacaaaaacaagaaatggggaaaggattccctatttaacaaatggtgctgggaaaactggctagccatatgtagaaagctgaaactggatcccttccttacaccttatacaaaaattaattcaagatggattaaagacttaaacgttagacctaaaaccataaaaaccctagaagaaaacctaggcaataccattcaggacatagggatgggcaaggacttcatgtctaaaacaccaaaagcaacggcaacaaaagccaaaattgacaaatgggatctaattaaactaaagagcttctgcacagcaaaagaaactaccatcagagtgaacaggcaacctacagaatgggagaaaatttttgcaatctactcatctgacaaagggctaatatccagaacctacaaagaactcaaacaaatttacaagaaaaaaacaaccccatcaagtgggcgaaggatatgaacagacatttctcaaaagaagacatttatgcagtcaacagacacatgaaaaaatgctcatcatcactggccatcagaaaaatgcaaatcaaaaccacaatgagataccatctcacaccagttagaatggcgatcattaaaaagtcaggaaacaacaggtgctggagaggatgtggagaaatagaaacacttttacactgttggtgggactgtaaactggttcaaccatggtggaagtcagtgtggcgattcctcagggatctagaactagaaatgccatttgacccagccatcccattactgggtatacacccaaaggattataagtcatgttgctataaagacacatgcacacgttatgttcattgaggtactattcacaatagcaaagacttggaaccaactaaaatgtccaacaatgatagactggattgagaaaatgtggcacatatacaccatggaatactatgcagccataaaaaaagatgagttcatgtcctttgtagggacatgggtgaagctggaaaccatcattctcagcaaactattgcaaggacaaaaaaacaaaccgcatgttctcactcatgggtgggaactgaacaatgaggacacttggacacaggaagggggacatcacacatcagggcctgttgtggggttgggggagtggggagggatagcagtaggaggtatacctaatgtaaatgacgagttaatgggtgcagcacaccaacatggcacatgtatacatataactaatctgcatgttgtgcacatgtaccctagaacttaaagtataataaaaaaaaatatatatatatatatataaaataaaataaaataaaatatgttgatgactgagtcctaccttgggagatattgatttaattgttttggactggttgtctctctttttgtgatattagcagcctttggtgaagttactgagatccattagttcattaggggctctaggtggtaatcttgttaacatctctgggcttgtatttttttcatacacaatgtgaaagggttagcgtacattacctgtaagcatccttcccactgggatatgctgtgctcctatgggtaatactcttaattaggggtttgtttgaaagcatttactctttcttcctggtgatttactggcgtatgtttgtgtgcatgtatgtgagcttgataatgctccaaaataagaaaaggcatccatctttattatagagaaaccacaatagtaaatcagaattctagaaagagacaccaagccttctactccaacatgtcaggcatgatattagtctcctatacatactgtcacatactccttgtagggcctgttaaggaacagggctctgcaactgggccagctggatttttaaaaactgttatttatttattcattttatacataggacatggggaaacatcagaaaacagtagcaagcaactctttttgaagcattttggcaccgtatgttgtcccatcagtcttcaattagttcatttgctaataatattttcttaatctgaataaacaataaatccaggtacctatttgaggtatgatacatttgaaaagctttttagaacacagaagccaaagttgttcactctatcattaaatatcattaaaaagatgctgggcacagtggctcatgcctgtaataccagaacgttgggagtccaaggcaggaggattgcttgagcccaggagtttgagaccagcctgggcaacacggtgagacctggtctctactaaaaaataaaaataatcagccaggtgtggtggcatgtgcctgcagtctcagctatatgggaggctgaggcaggaggactgcttgagcctgggaaatcgaggctgtagtgaattgtgattgcacctctgcattccagcctggatgacaagaccctgtctaaaataataataataataataaaaaagataatgtagctgagttgaattaacccatttagggatgcattttttcccaagggaaactacagggtcattcctcacaagtagatttcactatccccacgcaatcagatttgggggatcagataacatattaactgcacttatcactgtgaattacaaagccttcgaaaaatgcaattacccatttagataaacaaagacatgcactttttggggcaaataacctttttttgtagaaaaagttattacatgtaacaggcagttattttgaaatgcaagcttcataacttactataaaatgagatcaatcacttcacataagtaacacatcaaaaagtgtaaatcagaccatgtctggtggctcatgcctgtaatcccagcactttgggtgactgagacgggaggatcgcatgagctcaggagtttgagaccagcctgagcaacacagtgtgattccatctctacacaaaataaaacaattagctaaggcgtggtggtgcacacctgtagtcccagctacttgggaggctgaacctggaggatcactttagcagaggagttccagattacagtgagctatggtgcagccactgcatccagcccgggtgggtgacagagtgagaccttgtctccaatacaaaaacaaaacccaaaatagtgtaaagtgcttataagtgtaaaatgcctggcccatagcaagtgctcagtgtatttgcatttatcactatagggatgatttgtgtggctgttgctgcaatcattactaaacattacttctgagtcttttggttaaattgttttagggaaattaagaaaatactatttgtttgagtttttttttttttgtttttttagttgccaattatgttacaaagtggattatacctgcaaggtgagtgagcacactgtggttcttgttaattttttaaattgttaagtttcactatacaagatatttaaaatcaaacagtacttggtacaaacaactgtttcattgatgttgtaatagttttaaatagatggatagtgaaaacaaagtgaaaataattttggtaattccagaaaccaaaacctgggagtgagcatgggtactgagtgctgggtaaaatttacaacaaaacctttatcaatgaggacccagataacagaaccttctatgtccaggattctaatggatgcccttctgtattacagtggatctcactaagcatctttacactaaaacatggtgttgaggttctggatgtaaagtggaagagtccatcatctcagagtaagcttatgtttaggctgtgaaaaatgaaggcttgaagaacaacagccttagagaaaagaagaccatgaagtaatcttgtgtatgtattaaagaatcagcaatataatcattatgacctaaatgagtagactgagtggcagatctatttcactgaatggtaatataagaaaagatatctgcctagcaataattgtctccttgacatctcctttttctttttattaaccacatctttgggagtgatttagaggtagctgaaaccaactagcctgggctgaacagtttctgtattgcccagaccatcttgtttctcaaggctgcctttcgttttggttaatgagaaagcatatggttgccatttcctttctgagaactgctgagttagtagggaaggaagtagatgttcagctgagttctgtcctgtgggggaagggaagggctgagccacagcttggagtaccagcttctgcttttgtggggcttgattttctgtgtctgatttctttttataaaatgttcatataattagcctgaacagcccaacctaatcccttttctgggggcaaatgattgagagttgagtggcaaactttctttgcccaaactcttggccgtaactcttaacattcttaattggtttcctgtctattcttaatcttttgaagatcttgtcaaaccttaaaaaaaaaaaaaaaagagctctgccttaaatattgcttctgtgagaatattttgcctgtttaagaaaatacagctttgagtacaatccaattgaagtgtcaagtcctgccagataaccatggtagaattagagcttctgagctggattgggattgaggttggacgctggctctgccattaactggcatgtttcatcatttgttttatttgatgttgaaattatgcttataattttattttacaccactttccagtatgacatcagtgtctttggcaccttgggctttattagttcatgaaatggaagcttctgtttccttaaaaatgccttgactctcttgctaatgttgtgataatgtttccaactctttctagggctataatatctatgctgcttgtttgcaaatacttgggaagtggtggttgatctaaagatactcagaaagaatggggagaaaattaaggcttctgacacttttcccaacatttctgttatcatcaccaagaattaactagatgattctttaatgccccactactttattctgctattttatttcttcagtctgtttttgactcttataatgacaccactggaagttaagtctaaacattacctttaggctggagagctctggggtcaagattgactagatttaaaacccagctcagccattctctagctatctggtctctggtgagttccatcgcctgtaaaacggggattaaaaaggggaaaatactgagtatgtactatttgctaggcactagttggacaatttatgatccatttaatcaatcttctgctaggcagggatccccattttattatggttaaaaagctgtaataaaagccaattgacctaaagctctcacaagtaaatagctggagcccaggtttgtctctaaagcacatgctcttttcactacgcgacataaaaaaaactttattaatctttttttccagattatgtttcaagggttcccactgctgttgaataattaattccttttagatgtacaaaagcaagtgcaaagtaaaagaagaaaagctaaatggggaaggtgtgtaatatgagaggcagggggtaaggaaaaatgagaagtctgcaaaggaatttacgtcctatctgcttagcattacacagtggaagcccacgtcagacatttgtgttgcagtcctgcctgctcaggggttgctgggtgaccttctgcaaattacctcatctttctgggtttcaatttaagtatgcctgaaatgaggcggttgaattgatctccaaattcccttctggtgctaaacttccagccttgtagccactgacgccttcaccatcccagcctgttttcccttggtaccggaccagctgcccttgcccgaaccctgttcttcctcgactgcgaactttctaacgtactcacaggttctaaactctaccgttcctcgtgaccgagggactaaagggcccgggcaggggctcaactctgagagaaaaaaaggcaagaaaactccaaagttggacagcaagcgtcaaaagactgcacagcaggaaggcgaaaccgaacagaactgctgctgcgcggcgacagctgaagtgggtggagaacgggagggcgggggaggcggggccgagagcgattggaaggacgagggggcggagcccgcgctgacagcccccggggaggagcgagggaagctctgcgggctgcggcggccgggtcccgcccctttgcttcccctccccagcaccaggcgggcgtggcagcaggcgtgccgacgcagcgtgacttcacaaggggaggggcgggccgagggtcctgccggcgcgcgggcgtgttcatcagtcgctgtttgggacgctgggtgtgcggtgttctgtctccgctcccgtttcgctgtcacagcccgttccttcccggagcccgggacaggctgggcgcgcgcccgtgtgagtgagcgggactcagggcagaagtgtcccctcactgcgtttttttttccttttatccaaagaacggggcagttagtacgcttgccttcctgtcgcccggttgggagcggggttggtgtgcggagtggttcgcctttttttctttagaacttgtgagccttttttttttttttttttttttttctttttttaggctcagtgctgtccgggctggtttgcccggtccctgactaacggctttctgccccttctctcgccacccctgcccaaggtcgcccctctgccttcgcccctgtcccgggagggtgggaagctttgaccccgccctgcccactcgcgtctccgcagccgtagccgcgcctgtcccaatatgaatagggtcaacgacccacttatttttataagagatattaagcccggactgaaaaacttaaatgtcgtctttattgtcctggagataggtaagtggggtttgcagcctactccaccgcccgctgtgcctcccggggcgggagacaggggcgccggccgctgcgcgcccggggctcccctcctcctccctcccctcccccacccacgtggctctagtggcctccgcccgagatcggatcctacctgaggcgggagccctgggcttggtcacttcccaccttccagatgtattaaaataccggaggaggagttagcctttctggatgtcctcattatctaacaacccctccctttgatttttaaatcctcacaggacgcgtgaccaaaaccaaagacggccatgaagtgagatcgtgcaaagtagcagataaaacgggcagcatcactatttccgtgtgggatgagatcggaggtcttatacagccaggggatattattcggttgaccagagggtaggtgtgcaaaaaagtccggggacctaacagtctgcagaatcgggattggccggctcctgggatcttggcaagccctgaagtcccccgccttttctgtgggccactcttgaggagttttgaactcctttggtgttaactttgggtggtgggcagcgctgggatgtaacagacctttgcagtgaaaggcagtcggtttcagctgggaaatccgcgcctctaccccggtttacaggttaagtagatttttaattattattattttttgggaccgagtctcgctctgtcgccaagctggagtgcagtggcgtgatctctcctcactgcagcctccgcctcgcgggttcaagagattctcgtgcctcagcctcccaagtagctgggactacaggcgtgtgccaccacgcccagctaagttttgtatttttagcagagacggggtttcagagtgttgcccaggctggtctccaactcctgacctcaagtgatccgcgcgccccaacctcccaaagtgctgggattacaggcgtgagccaccacgcccggcatagatttttagttctattctgagtcagtgagtctttttaggagactggtatagtccatattttttcttttttataagttgttttctctagtgtagttgccactcagttgtttcccaccccttctccatttttaatgacttgaaatcctggccagtattttacatatgttatttagaaatgtggacataaatgaaaattataggtaaaggatttagcatattctgtgatatgtcaaatttgtacttggaaaaagagggaaactttacagtatctggaaggctcattctccaaaatgatttcttgtgtcttctgctgtaaggtggatgttgcgcaaaaaccaaagggatacacagaaaatgtttggcagaaaggcatctacaataccttcatccaaaagagtcagttggcggataggtggctttaaaaaatactagaactttttttttaaaaaatagattgcttttagaaatttaccaaatttttatcttaggaagataaaagggcagaaaaggatcttaaaaacagaatttggaagcttttgagatcaataaaattgtaataatttatcattaactgcagggaaagtggtggagattgatgttggcctaataagtagaatcttagaagtattggaaagcactgagagtaggagcttagagctccttggtgttaccttgcaggcttacaacatcttcaggaagtgaggtaaagtgtcatcaaagcaggaagtgagagtcaggacttagacattttcttctcatacactgactcatgacagtaatttaaacttccacatctttaaaaaacaaaagagaattccttcttagggaagtatggtgaggattgattagtatatttggagtttttggctccccaaatatttttcacccaatgattgaaagtattttttacgctaaaaacggcatcttatttcaagtatttcatgttctgtagtgacagtcataggtgtttccatcaaaaaaattattggaaaattaaacttattagttaggtactatagaattttaaggggaacaattacctgggagtacaatttaaacgaaaattaaaaactatagaaactctatttactacttcagtatgaccttgagaagttactacacctcatacttcagcttcctcttctgtgaaatgggaataattataccttatttaccaaaacaacacactcagcttggagtctggctcattctaaggcccttaaattctggttgaatctaagaaaagtagcttttgaagaaaaacatacctaacatctaaataatggttcaaatatcaacatgtttatcagaataccctgaaaacttacctcagtgttctcatttcttaaagtgaatgttaaatattttaattgtaaccaaattttttctcaaaatatgggttaatttttattttagtaaggtgaaatgttaatgcactgtatcctaagccactctttgtataacttaagagtggtgaatggtgtctttaataaataaccctttaattaaagtaaagagaactgtatagtaagttaaagtcatgaagttaccatagtagttgtacagagaaccattgagaaccaaaccttggattgattttataatattaatttacctttttcttagatatctaggattattttatgtagtgatgctgtctgctttcaaaattgttcggagtaaacatttgccagtttgtttactacaaacccagcatggtattaaaaatcacatgtttggaaaggcagataggtgaagctttgtgaccttagtgttttttttagcactttgaaattctaccagatcttcggtagcttaggaatcctgtgtcttttatggaggcagaaggaaaactgttatatcattatttgactagactgtaaatgaaacattaggatgattttacatatcttgtggctgaaaaatagtttctgtttaaatttctgcaattaaaagcttttgttttgttaattgactaaagatgtgatcattgggtataataatactggctttgcgaaaagacttattttccagaatttgttatgatttagataattatgtcaaaattcgacagaatttttgtattcttttgtaaatagcaagttatcaaagttagatttattgtatttgatttactatggtggatagagagggcttgatcctcacttctaccttaatacaaaaaatatatagtgtgaagatttacttgatttaaatagaagaaaataaatatatttctaaagaattaatgtttcttttctctctaggtatgcatccatgtggaaaggatgtctgacactttatactggaaggggtggtgaacttcaaaaaattggggagtaagtattaaaatgcattttgtataattgcatatattataaataatatctacggaatgattggtaggtatgaattgtaaacctctttggcttttttgactagtaaactgaatgtctttggtagcttaattgaaaaaataacttcgtgtatacaaatttaacacttgtcagtactgttttctgtggttaaaagtgtcaatttttcctggcaaagagcagtagaagaagctgcagttgagaccagccctagtggaagcatttctgtaggttttagaaatgtgcattttttaggtgtcacaagagccatttgaagtagattctcttttgtagtgattcaccatatacgaagctagtgattcaccaagtttcaggccataagtttaaattttctttttctatggttatgggtgaatatgtactcatgttaaaaaggacttgcagcaacgaaaactgaagtcctctatttatccacagtctaggtgcggtgcaggcagccgcaatgcgagattccatacactactaccctggtaatgatctccaccctgacctggaggagccatcctctctaggggtgtaaggtaattcagcctccatgttagcctagacattgggttgtattcataaagtatggtacaggcaatgagccaaatcatcagtccattctgtttggttaatgctctgccatctacttaatgcctgtcaaattggaagatatttaaaaagagaagccacaaatggcaccagataaaaaaggaaaactgtttgccactgagggaataagatgcttatttggagaacctgtggttaataatgaaggaaaagaaatgatcatgctagcttttaaagatcagaaacacttaacgctttgcctttgttagaagggaagttaggattcacttagagtagcattaatagagttatgtgttatgaaaggtcttagtgtctgttactgaaaggttcaggattctgtcctgaccttcatgtattcatacagaggtgttgataataatggaggtcagttacgtgaaaaaccgttagaggtcactcatttcttaatgactgctctttgtcagggtcagtcgaggatttaccaaaactggttctgatttgtcttcagtatggtgaggagtaataaaatgcttctttgtaatgttagtacacattatatggtcaacttacaggaagcacttggataaactggtggctatgtagcctgttgttattatttattgcctagaaaccactcttaaccctaaatgattatctttgcagatccacagtgatcgatcaaaagagggactgaatgggagtgggtgaatggatcggtgcaaatccattaccactgctggagaaaccaccctggaaccctaaacatggttcactctcatgttatttttcctttgatcagcttttgtggaaaaacaggacagagatgtttttgtgtccttgatttttgatgtgatttttttttcagcactaaagaagaatttaaatacaaaatagaatgttatatatcttgtagacagtcaaatatttgatgttttatgggacataatcatttgggaagtttttgttgtaaatgaagagttagtttgttgctattaatttgtttgacacataagttcattcctaaaagttagagatgttacataaagaagggttgaggactttatttcagaagtcatttaattttttctttattttctttcagattttgtatggtttattcagaagtgccaaatttcagtgaacccaacccagattatcgaggacagcagaacaaaggggtaattgtgtagtatacttttatgattaggctaattttgactgtgttataattctatgattaggctagccctgttgatacttagtataaagaagataatttttaaaaggatacttaatttttattgtatgttttgtgaggatatgtatctgaggtgtcatctactagatatatgtgccattttgcactttgtggtgtgctgagtaattatcaggaaataggatgtaacagagctctgaaaggtttgggaaacgtttcttaacattataacctttaatgacctaggaaaaatctttaaaaaatttgttaattaaaaaaaaaaaaaaagccaaacccaaaactttaaaaaagaaaggatataataatgttgtaataatataattgtgtttttattctcgtttggttaaattaaaaacttttttttaggcacagagtgaacagaagaataattccatgaatagtaatatgggtacaggtacatttggaccagtgggtaagattttgtttgtgtgtttcatttgtgatcaggtataagaatgaagagagctgtaaagattcacgtgaaaagcaacgtctttaggcataaattagtgataaaggtgaactaccagtaaacagggaatccccaaagggctgattttctagaaagttgataaacttaagccagtttattgagaattctaagtttttgtgatgtccgtgaagagataccatgctattttttttttattgattcctataaaatttctataatctagtgattacttatagtagatgcagaattactggttattttggtgcactgaaagcgttttatctttagagtcatagttcaccttaatttttcacatacaagtagctgctgctttaaaagatgagctgagccgtttaaaggctagtgaccctcagatgtcatttaacatgacccccagacatcatgttcatgatccttgtagctctgttaaaggtcttctgaagtcttttttcttaaatatatgaggaaaagtcagtcttttgtgattagagttcattaggatggctcatgttttggttttgttttgtttttgagacagggtcttacgctgttgcccagactggagtgcagtggcgtgatcttggctcatcgcaacctccacctcgcaggctcaagtgattctcctgcctcagcctcccaagtagctgggattacagatgtgcaccactaccacccagctaatttttatatttttaatagagatgggatttcaccatatgggccaggctagtctcgaactcctgacctcaaatgatccacctgcctcggcgtcctaaagtgctgggattacatacaggcgtgagccactgaacctggccagctcatgttttatttgactcgaaggctacatgtcttggcattgctgatcacattgtgggaaacgctgcctttgcctttaaaaagttagaataacattgtctgttttgagatattaatcatatttgagccaaattccaatattcactattttgccctttctttttcttttatagtgtaggcaatgcatttttttactctattaatttctaattttgatgcccaagttggcttttttctctctattaatacagcatcaagttagcatatttatagcaatacatttggaaaaacttagagcccacattgttttttttttctgtataaaaataaaagtgtgtgctttaatatttttaagcattaataacatgttggcacttaagatagttctacttctatagactacctctgaaaatagtgatgaatttttgtattcttttttaggaaatggtgttcacactggccctgaatcaagggaacaccagttttcacatgctggcagaagcaatggccggggacttataaatccacaactacaaggaacagctagtaatcaaacagtgatgaccacaataagtaatggcagggaccctcggagagcctttaaaagatgacctatgctaaatactcatgtgtagtttttatactacatgccctacttgaacacttattgcacttttatttattgttaactgtgaaaagtacgtcctttattgggtttccttttatattcttggtttgttaagaagaatggtttgtttttatagcaaaactgttaagctgctcgagtctcctgttgaagaatgggaacactgaaaagtaggggcatttatttttagagtaaaaagattattggatagcctttaaaaaacctgcacccatttcatgggtgagttacttaagacatcagctttatagcctctatgagtctatcttctgtataagttttgtaatatttaacataaggcttaatgggagatgttcttttgtcttgtattcagatattgccaactaaagcaataaccatcaaaaaacacaagaacttgtcaatgctagcagtaatttttgagtgtttgtggctctcggaatgattgacttcgttcagtgactactattaagattttccaaggactgactcatcccaaatttttgttgtattaccaaaaaaacagattccttatcagaatttggaatagaatgtgatctctattgcaacaagtaattttaaaagaaagctacatttattttagagtagtgctcctaacatgtattatcaactttgtggattacattggaggaaaatttaaaactggggccttgaatatttattttttgaaactaccatgttaaatactgaagtataatttgggggagttataaagttatgataaacattcatctgattattttaaacaatagttgtggtagataaacatactggaggtgagtcaaattgaattcatatagtaacatgcagtctgaagtcctagttacttaataggtactcagcctggagtgaaaatcctgggtactgactttgagaggagtgagtgtgcatgttgtcaaagtttctgaacacagttcacatagccttattagcaaaagttttaagaaatggctctatcaaagaagcaattgcagctttattcagaaatataaaagtggaatttatgtacatgtcataagtggtacccacttcccctttttactgtagggtggataactcttaggatttaactctttgaatattatctcttgaataaagcatgtgttaatgttaacaaacctacgtaatttttgccctttcaatgacttacagtggagagccagtacatcttaactactgttgtagtgatggtatcaacctcatggttacttagctctgcatttgttgctttgttttttttccacttcaaatcacaaaataagtagattttgttttctgaaaactccatagcatttgaatacaaaaagttgtgccagattgtttgccctaattcactgtgtttaacaaatatttcagtacacactatgtattaggcactgtgtggaaagtgttaaggggtagacaaaataccgaataatctccacaagtttatttgtggtctatagtacttttgtaactggggttacaaaaattatagaaatttttttcctttgttcatatgcatattcatgattataatttggctttgtttgtgattaatgttttcttaagattttcacattatagaatacctcaaaagaagttgtctaaggactgggatagagagtatgtttcataaaattgtagatgtttagaatttttaaaaaccctacaaattagtatatgattgttttatataagtaagataggagcaacactttaaattatttgtgggagaatacagcattaaaggtgattttaaaagaaaaaaatttggaattttagaaaatttaaatgctgtcaggtatggaatgctgggcttccaatcctggcctcattgtctcctcacctgtgatgttggatgagttattacacttgaaatgtctttaagccttaggttccacaagtatgaaaacaagtaagtaacagtatcctttctagacttgtttaagatttccatgtaagtaattataatgacttctgacacataataatgtcgtcttataccccaacagtaggaaaaaaatgcagaattcagtatgaaagtattgttaccctttaacacagtggtccccaacctttttggcaccagagaccagtctcctggaagacagtttttccgtgggatcgggggatggttttgggatgaaactgttccacctcaggtcatcagtcattagttagattctcataaggagcgtgcaacctcaatcccttgcatactcatttcacaatagggttcatgctcctatgagaatctaatgccaccactcatctgacaggaggtggagctcaggcagtaagtctccctcgcccgccactcacctgctgggcgttcctgttcctagcaggccagaattgatactgatctaggggttggggacccctgcttaacatgttgagattaaatggagaaagacttaagcttttacttttgtgattgacacttgcttcaataatgtaaccttgttctgtgtttttatcatttattaacaaatttcttttttcttaagggaagcctccaaaatcaaagaaaagtgagttacaatccataatgaatatttgccttaccagcctactggaacacattcatcaagaacttaagaggaagaaagttttctgccttcctccttcctagtgctctcagctatcaactttgaaataagtttaaacaacacctactgaaaacaaaaaccacttagtataaaaatatcccccaccagaattgggtcccccatatcatttctacaaaacagttctggagtggatcaaagtctcatcagatcagcttgccccttcttgtttgggcaggttctaggagaagctgctgtaatacaaaaactgaaagatgaaatcgtaaagctagataatgataatgatatttagtggggaaggctacagtatgttttcccataggcatttaaacactcactttttccaacgctttatactttgtccctatagcctttgtaattttaactttgatgacagtttaacttaggataacctgaatatgggtattactgttagtcatttgtatttttatcatttaacattttaaatgaatgtttaatttgctgggttgagtaatgccaagggaatgatgctaaaaacaaatagatgtgaggttagtaaaagattaaagttacaatttatgatacgagaacttcttaactataggaaagtaggtaaatgaccctaaaaggttttctcacaaggtaaaagttttacatcagtctgaagacatataactctaacatttcagtttagttactgaaatgactttttctggtgtcattgagatactggctgtttgttccaagccattttaggctgagaatgactcttaaggtcttctaatgcatttcagagggttctagaaacaacaaactgaacatgatatgaaactaacaacatagaatgccccccaaacaaattcctctaacctcactgagtttacttgccctattactattttttttttttaagatcttctgtctcttgtttttgttttatcccttacctgatgaaagtgaacatttctagtggagaaagaagatcacagttctctaatatgggcattaagagaggggtacagctagaggggaggtgaaaacctgcctccactggggtgaaaaacagtgtgctgaggtttcagccagtgattacactgggtaatcaaccagtcccatgtttcacaaaggagttgtaatgattaacagttcaggtatgcttctgaggaaatctaattgagacctttggaaaatagcattgttatgaatggtgtggtgttacgccctgagggaaaagctagaaaaacattttacttttcaagtgtatttaaattacatccaaatgtttcagtgtgctttactggagactgcctgagtttggaattcaaatattgtaaccaaattactccaggtttctgaactaaaatgatctattgatgtttctcaaagtatagatcacagagtaagaaaagaggaaatcaagtctggtttatgacaaacttttttccatgttaacattggacccaaagatgttactaagagctttttactactgtgagagaaccagcgtgatgtgaagacaacgaacattttaagaagtttgactagtagacatttcgtttaagtcttttggagggtcttggttgacaacccacaattttattgtggctccccaggctttgagaacgtgtgggcttggatgatcattgttgacctataaaagagcacaggtctcttgagagtttattgacacactactgatcagacccccacaatatgtctcaacctctgttgaagggctagtgatgtttaaaaaaacctgttatttccaatcagaaattgaagttatgtctcttactccatcaaaatttatgcttttcagcattgggtaagtctagtttcttggtttgtatattaaatgcatattgagtaaaattcttagtgatttagaaaccatctacatgaggcttcccaggaacttgttaaaagtacaggttgcacctctgcattactagaataacatcagtgtacatttgggagatctgcatttgaaaccctgaggttgtctgcctcctgcccttgagatcttcccttgtattgaaattatatatatatatatatatatttttttttttttttcccctcagtttcttttacctttgtgaggctaatatatgctgacgtgttggattgtaaaacaaaaaattgtgcttaaaagaatgtccctccagagggcagaattgttgggtaaagcatatagcgcagagcagaataagaggttcagtatggcctctggatgagggtattgcaaattttgaattaggctcaaataaaatgatttaaattatatatcaattcgaggatcagatattaattgggaggtcacatgactttccttgagcctatctagataaaagtaaaatgctttttttcctacgtttttgaaaatttagagtttattgttgctcatctcagcaaattaatgttaccagcatcttctgccttcctcctgtccctcaattccctactttactaaaagaaggctggccaaattgaaaagtagttgagttggagacttgataaatacttttgaaaatacttagagaaaccacccttcatcttccacgtaaagatctcagttctgtacagagaggcaactacaatgagtattttctgcaagtaacatggaaatcatgatttgattgccatgtgtttctaatgttcagtattaaatgtttatagccctcgtaggaaacaaacttctgacctaagttgctggactacttgaatagaaaggtagtcagcacaactagtgccatctactgggtcattgctgcatagtttctgtctgtttagaaatctggcttagtttaacacgtgggggaaatggttctgttccaatgaatagcgatttttgcctgatagtggtgttaagtatgatatggaaaatccttaaggggcagttgggccatttgtttagtttatgaacaatcaacactgacattaaatttcagttaagtagatgaaaccctgaactgcccctaaagctatagaaaatatgggaaaggttgccaagttttgtattctcatcacatttgtcaatattgttggtgagaagtgtaaactgttaaaaatgccttttggtgagtggtggtttggtaaaaacaattgaagtagaacacgacactgcccttagaaatttcattcctttacccaatggtatttggtaaaatcctggccaaatgactgctgctgttgtaattatgtgagctttgcagaacataacctattttaaatgccagaatgtgcttccatgaagaagaacatggttttgggctgaggagatcttggtttgagtcctggatctatttactggctccaggaccatgaacctcgttataaaatgatagtggggctatgtactcatagtgttaggaggactatgtgagctaatgtatgcaaaacatctgctccatatctaagggtcaacaaatgttaagccctttctccatcagcattggaaataagttaaaatactgttcatttctccatgccattattagaaaacaatcttctataatttaaaatctgaaatattaagcaatttatgtgaattattacaattatgttcttttttaaacagtcaaaccaagtttttcctgtcttgtctgggcacagacaagcacttatgctgacggtttaccgtgacagcatgtagggttgggtcttcattacaaagatctgcccactagctgagtacactggtgtttttccattcacctctgcccagcaggacaagatgatgaaagtacagagaacttgtgggtccaggtttgtgtcagaaaggaggttagtggcttgcttagggccaggcagagggcacattggaaggaattctctgttcccggtgacagcccttggaattgctgtgcacccagagttgcggagtaatttattggcttctgataactatagtattggataacttcccaacattttattaaaaattttaaacatataggcatgttgaaagaatttatactcaccacctagattttgccactatcacatatctgtgcatcctattaatacatttttaattattatttttttgagacagagtttcttttactcaggctggattgcaatggtgcaatctcagctcactgcaacctctgcctccaagattgaggcgattctcccacctcaggctcctgaatagctgggactacagaggggagccaccatgcccggttaatttttgtatttttggtaaagaaggggtttcatcatgttgccccaggctggccttgaactcctgggctcaagtgatcctctggcctcagcctcccaaagtgctaggattacaggcatgagtcaccgtgcccagccagccattaatgcatttttaatatatttttagtcaattgcagacatcgtacaattttccctaaacgttgcaacatgcctattcattacagttcagtatttttcaggattttttttttttgtaaaatttacaaagaaatgtggaaatcttagttgtgcattagttgagttttaacaaatacctaggctttatcgcaacctctatcaagatacagaacattgctgtcattctagaagcctctgtaatgtgccttccccagtcaatctctttttccatggccccagcagccatcattctttcaatactttaaaaaacattcttatctgaagggaaatttcatatgtgccaaagtcatctctagatttctccaagtcttaaccatgccagagtacagccaaacctagcccttcatgcatctcaaataaagttctaagatcttggtattttattcttccctgtttcaacttagctccaactctttttttcttttttccatcaagatttaaacctgtcatccttgacatttggggcagaaactgctgaaatgaaggaggacttgccatcaaagaactggctgaaaggagttagcacaccactcctctgccctgaacagttctaagcaagaggaggagcctgtggcagggcgtgatatgaagtcctcagagatagagtgccaagagtagagggagtatcctggaacttcagtgtttgcaggtcagttgctcagttcttcagaagatattgattcttaggctctaattttcttaaggtatgagctgaactgaagtgctctctcctccttaggattttgtactccaaggttggcattcagaatccgcatagccagagagtgtaagttacttgtcaagtaaagacaccccgccccccgctacaaccccccaccctgagtctacagggaaatattcctgagtgaaacagactaaaaaaatatagtcatgtgttctttcccagtccatgtgcacgtgcacgtatatacacgaacacatgacacattatcactgccatcagaggtgtttctgcattgaactccacatatctgagtcacatgcatatcaggtctttgcttttctttctcatcaattgtttaaggattctctccttccacttctttaatgggctgcctatactttgttgagcactaactatatgccaagtactatgctagtgagttacctatgaaagaccctgagagggaggttttgttatccccatgggaaggattgagtagtttgcatgagatcacacaactaggcggtgactgagtccaacacaccaaagcctatactattacagttgagcaatagtgaaacattgaggctgctgctgacagtggatggtgcttcatagaggatatagaattggagttagttttgaaagggagtgtatgcagaggggaagatggagaacaaaatatggaatttgactaatttacatttttacctgagattagtcatactttaaatgtcaacttattacaaacccaattagtcaaatttaagtctacagaagtggtatcagatcaacagggaaattatggactcttgggtattgggataactggatactctccctaaccaccacacaaacagtaaaaaaccatgggtgaattctattaagaatggagaaaattttccaaaaatggctcaaagtccagaagcattaaaggaaagattgatcaatttgactacatttacatgttaaaaaataaaatgacaactgggaaaaacatttgtaacatcacaaagggctaatattcctaacataaaaagaacttgtataaatagagaagacaaaacacactatggaaaagtgggcaaaagatatggacagttcacagaaaaaaagttcaaatggcccttaagtatataaaaagatgctcaacttcactcataatgaaagatgtaaattaaaataccaccaagataacattcttcacttttagattggaaaaaatatgaaagtttgaaaacacacttgcttggccaggtgtggtggctcatgcctgtaatcccagcactttgagaggccaaggtgggtggatcacctgaggtcaggcattcaagaccagcctggccaacatggtgaaactccgtctctactaaaaatacaaaaatttactgggcataatggtgcgcacctgtaatcccagctacttgggaggctgaggcaggagaattgcttgaacctgggaggtggaggttgcagtgagccgagattgcacctctgcactccaacctgggcgacgagagtgtaactctgtctcaaaaaagaaaatattctcttggtaacactattggaataggaacattcactgatggaggaaatgcaaaactgtataatctctgttataggggaatttggcaattttacatttaaatttgccttgtgacccagcaatcctgctatattattcctttcatattgctataaaaaaatctgaggctgggtaatttataaagaaaggaggtattttttttcatggttcttcaggctgtatacaagcagggctgttagcatctgctcagcttctgatgaggcccaggaagcttttggtcttggtggaagagaagaggagccagcatattacatgacgagaggaagcaagagagataccaggctcttttaagcaaccagttctcatgtgaacgcattgctactgagaaagtgccaaaccattcacgagggatccactacctagacccaaacacctccccctaggccccgtctccaacagcggggatcatatttcaacatgagacttcgaggagacaaatatccaaaccatatcgcccacgtttaggaatgtctctccatggtagatgatttgcaaatagacggtggtatacccattccatggaagcagggaaatatgtttgcacgtctttggttagtcctcttcttttctactgacagtgggcttgtccatgtgtcctgcatgatcaaaatgacaatagcaaacttgatggccacagaagattgaaaagtgcttgggcattgagcttgctctctcttgaagtgcttggagccctgagactgccatgagaccatataaatgatcactagctagcctgctggaggatgagaggtcacttgagaaaccttggctcacagcctgcttacaccagacacatggatgagtctgtcttagactatccagctccagctgagttgccagctgacttcagtcacatgagtgagaacaacagaaggacagcactgagctctgccaaaattgctgacctacagaatcttgagctaatgaatgattgtagctttatgccattaagttctgaggcagtgtgctatacatagcaaaagctaactgatacaaaactaaagatacaatggcacaaacatgaaaagacatgttcaccgaagcattgcctataatagttaaagactggaaacgactcagatgtccaccaactcaggagtggttgaacctactacagtgcattcaccccgtggaatactaagcagctccaacaggggtaggaaatttgtatactttcataaaatgatctttaggatatattgttaagtgaaaaaaacaaggtgtagaatagttaatagagtatgctacctcttatttaataaagggagaatataaatatgtattttgcttttatttagaaaatgaaagaataagaaaccactaaaatgattttttagaagaaagcaaggggacacagatggaagttagatttctctaaatttactttgttttgtagctagaactttagaaccatgtcaatgttttacacacgtcacacttataatcaagataaaaaatacttatacagtgatgtgtcacttaatgacagggatatattctgagaaatggtgccgttaggcacttttgtccctgtgccaacatcatagaatatacctactgcacacctaggctatatgatgtagtctattgctcctaagctacaaacctgtatagcatgttactgtactgaatactgtaggcaattgtaacagaatggtaaacatttgtgtatctaaacatagaaaaggtacagtaaaaacacagtataaaagtcaaaaaatggtacacttgcaagggcacttaccaggaatggagcttagaggttggaagttgctctgtatgagtcagtgagtgagtggtgagtgaatgtggaggcctaggaaattattctacactactgtagaatttatgaacatttgggctacactaaatttataaaaaacattttcttcttcaataatgagttagctcactgtaacttactttttaaactttttaaatgttttttaagtttttaactcttgtaataacacttagcttaaaacacacattgtacagctgtacaaaaatattttctttatgtcattctataagctttttaaaatattttcaaatgtatttttttttttaaagcttaaaaaaaacatgtaagacacccacatattagcctagacctacacagggtcaggatcattaatatcagtgtcttccatctccacatcttgtcccactggaaggtcttgaggggcaataacatgtatggagctgtcatttcctatgataacaatgccttctggaaggcttcctgaaggacctgcctgaggctctttttgaggcagtgtcactcttttcagaaatatgtccatggtggtttactcaatttgcttcttttttattcatagatttgcatatgtaatgcattgcgctataccattaagacagctatgatgtcactgcagttacagtgtcactaggtgatagaaattgtccagctccattacaaccttatggaaccactggtgcatacgtggttcattgtggtccattgttgactgaaacaatgtta

SEQ ID NO: 21 - DNA, 2942 bp, Homo sapiens
acaaggggaggggcgggccgagggtcctgccggcgcgcgggcgtgttcatcagtcgctgtttgggacgctgggtgtgcggtgttctgtctccgctcccgtttcgctgtcacagcccgttccttcccggagcccgggacaggctgggcgcgcgcccgtgtgagtgagcgggactcagggcagaagtgtcccctcactgcgtttttttttccttttatccaaagaacggggcagttagtacgcttgccttcctgtcgcccggttgggagcggggttggtgtgcggagtggttcgcctttttttctttagaacttgtgagccttttttttttttttttttttttttctttttttaggctcagtgctgtccgggctggtttgcccggtccctgactaacggctttctgccccttctctcgccacccctgcccaaggtcgcccctctgccttcgcccctgtcccgggagggtgggaagctttgaccccgccctgcccactcgcgtctccgcagccgtagccgcgcctgtcccaatatgaatagggtcaacgacccacttatttttataagagatattaagcccggactgaaaaacttaaatgtcgtctttattgtcctggagataggacgcgtgaccaaaaccaaagacggccatgaagtgagatcgtgcaaagtagcagataaaacgggcagcatcactatttccgtgtgggatgagatcggaggtcttatacagccaggggatattattcggttgaccagagggtatgcatccatgtggaaaggatgtctgacactttatactggaaggggtggtgaacttcaaaaaattggggaattttgtatggtttattcagaagtgccaaatttcagtgaacccaacccagattatcgaggacagcagaacaaaggggcacagagtgaacagaagaataattccatgaatagtaatatgggtacaggtacatttggaccagtgggaaatggtgttcacactggccctgaatcaagggaacaccagttttcacatgctggcagaagcaatggccggggacttataaatccacaactacaaggaacagctagtaatcaaacagtgatgaccacaataagtaatggcagggaccctcggagagcctttaaaagatgacctatgctaaatactcatgtgtagtttttatactacatgccctacttgaacacttattgcacttttatttattgttaactgtgaaaagtacgtcctttattgggtttccttttatattcttggtttgttaagaagaatggtttgtttttatagcaaaactgttaagctgctcgagtctcctgttgaagaatgggaacactgaaaagtaggggcatttatttttagagtaaaaagattattggatagcctttaaaaaacctgcacccatttcatgggtgagttacttaagacatcagctttatagcctctatgagtctatcttctgtataagttttgtaatatttaacataaggcttaatgggagatgttcttttgtcttgtattcagatattgccaactaaagcaataaccatcaaaaaacacaagaacttgtcaatgctagcagtaatttttgagtgtttgtggctctcggaatgattgacttcgttcagtgactactattaagattttccaaggactgactcatcccaaatttttgttgtattaccaaaaaaacagattccttatcagaatttggaatagaatgtgatctctattgcaacaagtaattttaaaagaaagctacatttattttagagtagtgctcctaacatgtattatcaactttgtggattacattggaggaaaatttaaaactggggccttgaatatttattttttgaaactaccatgttaaatactgaagtataatttgggggagttataaagttatgataaacattcatctgattattttaaacaatagttgtggtagataaacatactggaggtgagtcaaattgaattcatatagtaacatgcagtctgaagtcctagttacttaataggtactcagcctggagtgaaaatcctgggtactgactttgagaggagtgagtgtgcatgttgtcaaagtttctgaacacagttcacatagccttattagcaaaagttttaagaaatggctctatcaaagaagcaattgcagctttattcagaaatataaaagtggaatttatgtacatgtcataagtggtacccacttcccctttttactgtagggtggataactcttaggatttaactctttgaatattatctcttgaataaagcatgtgttaatgttaacaaacctacgtaatttttgccctttcaatgacttacagtggagagccagtacatcttaactactgttgtagtgatggtatcaacctcatggttacttagctctgcatttgttgctttgttttttttccacttcaaatcacaaaataagtagattttgttttctgaaaactccatagcatttgaatacaaaaagttgtgccagattgtttgccctaattcactgtgtttaacaaatatttcagtacacactatgtattaggcactgtgtggaaagtgttaaggggtagacaaaataccgaataatctccacaagtttatttgtggtctatagtacttttgtaactggggttacaaaaattatagaaatttttttcctttgttcatatgcatattcatgattataatttggctttgtttgtgattaatgttttcttaagattttcacattatagaatacctcaaaagaagttgtctaaggactgggatagagagtatgtttcataaaattgtagatgtttagaatttttaaaaaccctacaaattagtatatgattgttttatataagtaagataggagcaacactttaaattatttgtgggagaatacagcattaaaggtgattttaaaag

SEQ ID NO: 22 - protein, 202 aa, Homo sapiens
MNRVNDPLIFIRDIKPGLKNLNVVFIVLEIGRVTKTKDGHEVRSCKVADKTGSITISVWDEIGGLIQPGDIIRLTRGYASMWKGCLTLYTGRGGELQKIGEFCMVYSEVPNFSEPNPDYRGQQNKGAQSEQKNNSMNSNMGTGTFGPVGNGVHTGPESREHQFSHAGRSNGRGLINPQLQGTNQTVMTTISNGRDPRRAFKR

SEQ ID NO: 23 - DNA, 3046 bp, Homo sapiens
acaaggggaggggcgggccgagggtcctgccggcgcgcgggcgtgttcatcagtcgctgtttgggacgctgggtgtgcggtgttctgtctccgctcccgtttcgctgtcacagcccgttccttcccggagcccgggacaggctgggcgcgcgcccgtgtgagtgagcgggactcagggcagaagtgtcccctcactgcgtttttttttccttttatccaaagaacggggcagttagtacgcttgccttcctgtcgcccggttgggagcggggttggtgtgcggagtggttcgcctttttttctttagaacttgtgagccttttttttttttttttttttttttctttttttaggctcagtgctgtccgggctggtttgcccggtccctgactaacggctttctgccccttctctcgccacccctgcccaaggtcgcccctctgccttcgcccctgtcccgggagggtgggaagctttgaccccgccctgcccactcgcgtctccgcagccgtagccgcgcctgtcccaatatgaatagggtcaacgacccacttatttttataagagatattaagcccggactgaaaaacttaaatgtcgtctttattgtcctggagataggacgcgtgaccaaaaccaaagacggccatgaagtgagatcgtgcaaagtagcagataaaacgggcagcatcactatttccgtgtgggatgagatcggaggtcttatacagccaggggatattattcggttgaccagagggtatgcatccatgtggaaaggatgtctgacactttatactggaaggggtggtgaacttcaaaaaattggggatctaggtgcggtgcaggcagccgcaatgcgagattccatacactactaccctggtaatgatctccaccctgacctggaggagccatcctctctaggggtgtaagattttgtatggtttattcagaagtgccaaatttcagtgaacccaacccagattatcgaggacagcagaacaaaggggcacagagtgaacagaagaataattccatgaatagtaatatgggtacaggtacatttggaccagtgggaaatggtgttcacactggccctgaatcaagggaacaccagttttcacatgctggcagaagcaatggccggggacttataaatccacaactacaaggaacagctagtaatcaaacagtgatgaccacaataagtaatggcagggaccctcggagagcctttaaaagatgacctatgctaaatactcatgtgtagtttttatactacatgccctacttgaacacttattgcacttttatttattgttaactgtgaaaagtacgtcctttattgggtttccttttatattcttggtttgttaagaagaatggtttgtttttatagcaaaactgttaagctgctcgagtctcctgttgaagaatgggaacactgaaaagtaggggcatttatttttagagtaaaaagattattggatagcctttaaaaaacctgcacccatttcatgggtgagttacttaagacatcagctttatagcctctatgagtctatcttctgtataagttttgtaatatttaacataaggcttaatgggagatgttcttttgtcttgtattcagatattgccaactaaagcaataaccatcaaaaaacacaagaacttgtcaatgctagcagtaatttttgagtgtttgtggctctcggaatgattgacttcgttcagtgactactattaagattttccaaggactgactcatcccaaatttttgttgtattaccaaaaaaacagattccttatcagaatttggaatagaatgtgatctctattgcaacaagtaattttaaaagaaagctacatttattttagagtagtgctcctaacatgtattatcaactttgtggattacattggaggaaaatttaaaactggggccttgaatatttattttttgaaactaccatgttaaatactgaagtataatttgggggagttataaagttatgataaacattcatctgattattttaaacaatagttgtggtagataaacatactggaggtgagtcaaattgaattcatatagtaacatgcagtctgaagtcctagttacttaataggtactcagcctggagtgaaaatcctgggtactgactttgagaggagtgagtgtgcatgttgtcaaagtttctgaacacagttcacatagccttattagcaaaagttttaagaaatggctctatcaaagaagcaattgcagctttattcagaaatataaaagtggaatttatgtacatgtcataagtggtacccacttcccctttttactgtagggtggataactcttaggatttaactctttgaatattatctcttgaataaagcatgtgttaatgttaacaaacctacgtaatttttgccctttcaatgacttacagtggagagccagtacatcttaactactgttgtagtgatggtatcaacctcatggttacttagctctgcatttgttgctttgttttttttccacttcaaatcacaaaataagtagattttgttttctgaaaactccatagcatttgaatacaaaaagttgtgccagattgtttgccctaattcactgtgtttaacaaatatttcagtacacactatgtattaggcactgtgtggaaagtgttaaggggtagacaaaataccgaataatctccacaagtttatttgtggtctatagtacttttgtaactggggttacaaaaattatagaaatttttttcctttgttcatatgcatattcatgattataatttggctttgtttgtgattaatgttttcttaagattttcacattatagaatacctcaaaagaagttgtctaaggactgggatagagagtatgtttcataaaattgtagatgtttagaatttttaaaaaccctacaaattagtatatgattgttttatataagtaagataggagcaacactttaaattatttgtgggagaatacagcattaaaggtgattttaaaag

SEQ ID NO: 24 - protein, 134 aa, Homo sapiens
MNRVNDPLIFIRDIKPGLKNLNVVFIVLEIGRVTKTKDGHEVRSCKVADKTGSITISVWDEIGGLIQPGDIIRLTRGYASMWKGCLTLYTGRGGELQKIGDLGAVQAAAMRDSIHYYPGNDLHPDLEEPSSLGV

SEQ ID NO: 25 - DNA, 1566 bp, Homo sapiens
acaaggggaggggcgggccgagggtcctgccggcgcgcgggcgtgttcatcagtcgctgtttgggacgctgggtgtgcggtgttctgtctccgctcccgtttcgctgtcacagcccgttccttcccggagcccgggacaggctgggcgcgcgcccgtgtgagtgagcgggactcagggcagaagtgtcccctcactgcgtttttttttccttttatccaaagaacggggcagttagtacgcttgccttcctgtcgcccggttgggagcggggttggtgtgcggagtggttcgcctttttttctttagaacttgtgagccttttttttttttttttttttttttctttttttaggctcagtgctgtccgggctggtttgcccggtccctgactaacggctttctgccccttctctcgccacccctgcccaaggtcgcccctctgccttcgcccctgtcccgggagggtgggaagctttgaccccgccctgcccactcgcgtctccgcagccgtagccgcgcctgtcccaatatgaatagggtcaacgacccacttatttttataagagatattaagcccggactgaaaaacttaaatgtcgtctttattgtcctggagataggacgcgtgaccaaaaccaaagacggccatgaagtgagatcgtgcaaagtagcagataaaacgggcagcatcactatttccgtgtgggatgagatcggaggtcttatacagccaggggatattattcggttgaccagagggtatgcatccatgtggaaaggatgtctgacactttatactggaaggggtggtgaacttcaaaaaattggggaattttgtatggtttattcagaagtgccaaatttcagtgaacccaacccagattatcgaggacagcagaacaaaggggcacagagtgaacagaagaataattccatgaatagtaatatgggtacaggtacatttggaccagtgggtaagattttgtttgtgtgtttcatttgtgatcaggtataagaatgaagagagctgtaaagattcacgtgaaaagcaacgtctttaggcataaattagtgataaaggtgaactaccagtaaacagggaatccccaaagggctgattttctagaaagttgataaacttaagccagtttattgagaattctaagtttttgtgatgtccgtgaagagataccatgctattttttttttattgattcctataaaatttctataatctagtgattacttatagtagatgcagaattactggttattttggtgcactgaaagcgttttatctttagagtcatagttcaccttaatttttcacatacaagtagctgctgctttaaaagatgagctgagccgtttaaaggctagtgaccctcagatgtcatttaacatgacccccagacatcatgttcatgatccttgtagctctgttaaaggtcttctgaagtcttttttcttaaatatatgaggaaaagtcagtcttttgtgattagagttcattaggatggctcatgttttggttttgttttgtttttgagacagggtcttacgct

SEQ ID NO: 26 - protein, 161 aa, Homo sapiens
MNRVNDPLIFIRDIKPGLKNLNVVFIVLEIGRVTKTKDGHEVRSCKVADKTGSITISVWDEIGGLIQPGDIIRLTRGYASMWKGCLTLYTGRGGELQKIGEFCMVYSEVPNFSEPNPDYRGQQNKGAQSEQKNNSMNSNMGTGTFGPVGKILFVCFICDQV

SEQ ID NO: 27 - DNA, 64414 bp, Mus musculus
  misc_feature (1)...(64414): n = A, C, G or T/U
ataactgaacttttgctacattttgcatccattttcatattatttttagtctgatgaatttttttaattagtgtgtgtgtgtgtgtttgtgtcttgtgttttttcttgccgagccactttgcctgccctgtgagtggacttcttaacacagtttttaatctacttaaattatgccttttatttcgggctgatcagccctaattactttaatgaatccttagttaattggtagaaagattacagattgtttagtagacaagagtgtttactctatcaaaacagcaatttatttgcaagacggtttccttaacaatcatttccgtttccatttttagatgaattccccatattctgctgaatgacggtgcaaacggacactttaaagaaggaagcagatgaaactggagagtgttctttaccatagatcacaatttatttcttcggctttgtaaataccagtttctagaaaatggtaggaagttggaagctctcttctcacttggtgccactcccagcaaggagcgctgtgactaaaatgctaaaaaacctgcaagaaaagacagctttaagaaaccagtgttggtaacaatataacagaggactcctttgaaaacatttgtttctggttttatttcttaggtgttatttatgactttggctcagaaagctatgttaacatttcagggtgggtcaacaatacgtaatcgtgcctgaattactcaaagccatgggaagatttagcaggaaacccagataagaatcttcaaagtagatgtaagataggggaatgatggggcatgatcatcggtgattcacagggctgcagagatgaatcgtgaaacctccagatcgtcgggcagagctcatcacgtctgttatgctcatagctcctgggatggctctctcagtaggaaaaggatccagggtcattcctgtgtgcggggcaaatgcactaacattgaaagcccttcaagtggaccgatgggtaaacgtcttaggaaacgaagcccaggaagcaagtagtaccctggaccttggattcctgacatcacttgtaggttgcacagtgtacatctctagaaaatactggactggataagttcaggaatccctttgtattccactactctctggtcctgtaaacttaatctgagactacagaaggggtaaaccattccagtctctctgctggagagaaggaaggtgcttaactcactagcactccaagtatataagctgcaggtgtacaatgggcctctctatggggtctatgaggtcattgctcacgctgcccatagcaatcaggtagaatttctcaaggcttgaaagaagacacctaatgtctacctttggccttaatgtcatatgtatatatgtgcacacatacatactcgtacacgtacgtgtacacacacacacacacacacacacacacacacacacacagcttatagaccgttatccatatccttgctgcttactgagtcctttattcctttgctgctgtcttaggaggtgtgtgattgagtaggatggtgtcaacctggaactcggcttcctgaaattgcctgaaactgacagtagcattgatggaaacactatacatttgggaataatggttactgctttgttatttcctaccaagaaatgctccactgggctaagatgtcaaaggggttttagatacttctcatgccctggaatgtatcagaagtaccacacactcttacctacctagaaagttctcaaaatagagcatgctgacaaatgccaaggctccctgtgtgctgacagcgattaggtgctgtttgtgctagaccagagagtacacggaagctggtggtttgctttctttcacagaggcaggagttaccatatgagttcagtttttgttttaatttaatctagcaaaatcaaagttagttattttttaggcttaatttttattattttcaatcatgtgtagggtgggaatgtgcacagaagggcatgtaccctcagatgccaggggcattggttcttcctgaagctggagtcacaggcagttgtaagccacctgatgtgggttctaggaaccaaactatggtcttctgcgagcacagtatatacccttaaccactagtccacaaatccaggactctagagtttcaagatacttctcaagtgaatcttgtactccagagattgttttttttccaggtgacaggatttggccagaggtgacctgcagatacctgttaagttcattgtaaaaactggccacatgagctacaagcacaatggaatggaataggtcatatttctaccaaactctttcaccacatttttctccttttaattgcaatttagtttagactgctctaaaagtactgtgcactataaggctcctgcaacaggaacttttccttcacggttccaaaagttgaagtacaagatcaggtggcagcaggggcaggttctccctcttccagttgtagagaggcaacacttcaccttcttgtgtcatcatacaacagagagggaactggaaactcatcgagggtgacaatcccatttctgagagttcatcttcgtggtagcctcagagcctctgtgaccaattcccggacaatagcaaggagggaagagtccatcacggtggggggacacgtggaggagcagctccaaaggatcgcaaggacaaggctgtttgcattgtggcagaagagacagaagaaaaagcaagccaaaactcagtagatttaaccttcaaaggcttaccttctccagctaggctctacctcctaaaagattcataactttcaaacgagtgtccaggaccaaacactcaaaataatttggtatagatttaaaccttaatatggcctagttaccacctacatcatttagaacaacaattttagcataagaacttggaagacaccttcagtccataacaaaccgatggcaaataagatgcatttaatgaaacaagataggtttgatttctaaacattttccttctcttttcattgatcccagaccaattacagagtacacatttttcaaatcatttttaatataaccatttggactagggaaatagttcagtcagtaaaaaaattttttttgcaagtgccgggccttaatttaaggtcacacacacacatacacacacacacacacacacacacacacaccccttctgattctggcacccatttgtaatctcagagctggggaggcagagaaaggtacatccctgaagcttcagagagcctctcacctagtaggtgaaggccaggccagtgagagacttttcagggagaggtggccagcacctgaggaatgacactcaggattgtcctttggcctccgtgtgagtgtgcaaataaccaattcttcacctcagatggttcaggatgcctatgcactccttgtagtaggagctaatagaattttgggccaagtataggacttttctgtacatgaatagataatgacatagtccagacttagcaaattgggtgctgctcacacctactccaattcctgacacagggtaaatatttttttttaagttggccctgcacatatagtgatccaactgcattaaaaaaatctggcttgtcagtataactaatatccaataaaaatatacaataaaattaactttttaccatgtcagtatgaactctaacaaatccagagttatggaatcaccactggaaggcatggaccatacctgtctggatccttatgaagaggatgctacaaaatgtggtaaaagtcttctcaccggataacttcttttgtagacagagccccatttaaaatcagtggagggccagtgcaaaggttcagtgcgtagaaacaccacaccacagagcctaacagttcagttctgagaacccacataaaaactgtaatacagcagctggcatctgtaaactatggcaatgcagaaggcaatacagagacggattgtgtaggaactcaaaggtcagcctggaacatgcagcctggcagaaacaagagaatcctcttcaaaaaaaaaaaagatgggaagagaaaacttactcctgagagttgacctctgagcctcaaagatgtgtatacacatgcaactgcactcacgcaagcaaacatcatagaagaagaagaattagaaaagcaagccttcactcatgcttgaaatctccgaataactcgtaacactccgcattttactggagtagatgaacagaattcagggagtcataaatacaagcagcaaaacccatagctttatttccactaacttctagctgacattagaattccatcatttttaaactaagagcagcgaattataaaacataccacctttatatcatattacagtaacttcattattacatagttccctcaaaatattgaatatgctaagcacactttagagattatgatagtcagccccactgctagatcttatttagggccactagtcaaaaagcacttacactatgtcacaaaggtgatttcaatctggttttatgtgtcaccaagttcactagatatatatttcaatatagccattttctttctttaatcttttgaattttattttatttaactaaagacattattctttaaagatgttcataggcaatagtatatttaacactctacctccgaataaggacaatgacttagcagatctttctgaagtctgtgaagcttcacctcaccccccttcagctacattctctcagttttctaatcttgttgtgtctactctctcctctcgataatggtcacacaggcttcaggctctgaacagccttcctgccaaatgttcctatgtgtcagcacaagaaagggttcaggctgtagctccctctaagtccccagcatcgtggtccctccttgtcattgagctccttggctgtcttctctgcatgcacagtgagagagtccagtcagcaatactatccctagagtcctgcacaatctaagcttaatgagcagctagtcagtgtttggatacaagaaaaacaatggttcctttcttctctttgttgcttggttggtctctttataaaaatggacaaactccaaattcataaaatagtctcctttttaccatcctatccaaacagcaaacctgtttttgacacagcacagagagaacttcctctcaattttacttttttgctgaaattctgagctctgataaatgatctacagtcataggcatcaactctcctcagcttccctttgatttaggtatctcccaggaatacctaacagttcccatgtctgcccacttgaagatgaacccagtgtcctgaagcattccctaactgccttcattaaactcatgtgcgctgctactcatgcaaggcccacacaacattctcttctgtcaggactgacagtcattgccttaaacatctcttgtgctacatatgtgaagaaatatagaaaccatctacacggggtaagcaagaattgagtgtgggggcgggatataaagaaatggccaccgcctcactctctgttgggaagtttttcagaatacatatgcacaggatcagtgggcctaagggcctgtggtaagctctgcatggctgaattaacctgtgatttctacccccagtgttaatgatagtaattcattagaattagttctgagaactgctctgtataaagtattgcccttcccatctgagttacaaagatttctgtgtccatttgcttaattctctcatggtgagcatacagtgtcatttacaggagagatggtgtcctgaaattaccatgttctggtgaggaaaaatgaatatagagggggcagatttaaaaagtgttatgagggttataaaacagccattggaagaagtcagcagcgaaggcctcttctaggaagtgactcagctaagacctaaaacatggcagggggccagtccatgaactctgcctgctaaaaacttggggatatttcaggaaccaaaggaagccagtggcagagaaacccaaatcatgtaggacccactttgggagaaagctaaaggctctgcattctattgtcaatgttggagaaagccaagagaattttaaaatgtaagagtggtggtataaagtttgtttcttcattatatctgtttttgctcaaatgaaaatataacaaggactcttttgaaaagaacttgccacccctgcaattcctctgcatggaatggcttctacagggcaggccatttagggactttgtttttgagttccctgaatgactgttgcttcaaaattcttagttgggggctggagagatggctcagtggttaagggcactgactgctcttccagaggtcctgagttcaaatcccagcaaccacatggtggctcacaaccatctgggatgggatccgatgccctcttctggtgtgtctgaagacagctacagtgtactcatatataataagtaaataaataataaataattttaaaaaataatccttagtaggttttgcttagtgccacattttcattttgccctgggctctgcatactatacagctgctccagttttttaatgtgggaaagaaatgtccttttgccttgtgggatttatgtataaactgtatgtttatacatacccgtgtggaagtccagtgtgtatgtgtgttgggggagggaggggaggaccagctaggcaggtcctttagcatactaccaagactggcatcgagttcacctaagtaggttcttagtaaaggaaagctacagaatctcaacccctctgcctccccaattcagttaagtcatatatatggcaagcaaggggccaaactggtttttgtcagccaaagtcagaataattttccagtgactaagctatcctcctccctttgttgttctcccatactgctttggtgatcaccctggatggctgagagaatgaaaacatcaagaaatggttgattaaggcccatttaggccttgagcaaaaaagctgcccacacccccatccctggctgtgggtcccggctcaggatgtgaggctgccactgtgcaagcgtggaaggaagggccacgagaaaaatgggaatggagaacgaggacccttcgcttccttcaagtcactagacaagcactcaacctcagctttccccacgcaggaccgacctttccatcgtcctgagtctgcgcagtccgcggcgcagagatggggggcggggcggacaggctgtgggaaacccccgggcccgcgcctgcgcactgcctgccggcattgctttcgcttttcgatttcctctcaaagcagcagcttctcggtgccggctgagttcccagaaagcacgtggtgcggctcttcccagcagccgcctccctcccgccgcagcttgctgagcgcccggccgcagcgtccctagtggcgagcgcagcccttgcagcccgcggggtcctaaagcaaagcctggctgtttctgaaagattcaaggacattaaaaaaagggtgtgcatgcgatccaagactttaacagtaacattttaggatattttcagtgggtgtatttttttttacgtttgcagaatttttacaatacagactgccttttattcttagctgttaattggatattttccagtgtctttgtcagcataactttggtattctgtcatatgaattgtgctttagtcagctagaagacttttcagtgatacaaatggagttttggtaacagtgccctgcagcacaaatcttttatccatactggatcattttcttatgataaatttcctataaatccaagagcattgtaaaagttttaacagtctgactggatcttctacactataacctttaaaaatatattgattatttttatgtgaatatgtgcagtccagcatgaatttatgtgtgccaagtatcctcaaaggccagaaggtgtaggatcatctggaactgaagctggggttacagatggttgtatgagttgcctgatgtgggttctgggtactcaactccagccctccctaaaagcacactatgttcttaaccactaagctatctctccatcctcaatattataatctttagtagaattttgcacgttgtaccacttgtagttaatggaaagactgtagtttggcagtacatggccattctccaaagagtgtattgggaagaaaaatattgtgtgcacacagcaagtttgaaatataacatgtaccttgtgttttcacaagctgcaagatacagggctcctatagaattgctatgagctgagaagaaaaccaacaccaaggtaaggtattatacaaaatcgaaaaccaaagaattaaaaaaaactgtgtatttccaatgcgttcaaccatattccaggtaaacaaaaagggtgtatatccaatgaagtgacattctggggctgtatggtgccagtttcaagacttacaactggccagggagggtgagaaggcagtggcaggcattcttagaaattccagtagatagacattttgattatagcaatattactaacaagaaggtatagctaaattagaacatgccagatgagaagcaaggggaagtctgtaaacattttaccataagtttatttgttggctatttagctgccacagggtggaagaagaaagatcccagatctaacaagttctgtggatgagggtgtcttacacacacagtataaggtgttccttaaagagatgcttcaggaggctgtggggaggctgtggggaggctgtggggaggggactagggctgttccacttgggagttttcattttagaattcagttcttggatgttctgccgcccaccctccactccctacccccagcaccaccgctgtaagatctgtctcagtgatctggtttatagcacgtgtacaacacatgcacctcaccctccaacccactgtggcaaggcagccatttaatatttaatattgctagtgagactagcaatggtggggagcagaattgtgctccactgagtcacgcctgtcagatcttgcctgagttttctcacaaatctaaggcctaagcctggagaacagtatggacccaacaccattgacccacatagtcatcctctactcctcaaaaggctagcccgactgctccagacgtggcaggactctgagactctgtaatgctagatctgtaatgacacgatgcctgatattgttcaaaacaagtcaccagtcagccctggattcaaaggttaaaggaagggttctctccatctgctaaggaagtacacagtcacattccagagaggtgtagatgacagagaagacaagaccatggccactgctgaaagtgtggaccagaagatccttcctgcacagtccttggtaggactgtgtaaatgatagtatctagacatttgccttgcctggctgcattaatatatatatatatatatatatatatatatatatgtatatatatatatatatattcctagttactgtgaatatgtgttactataaatgctttgcacaatcagatagatataatcaatataagtgagtaagcgtggaatacaagaagtggtgaataagtaatagcaatgatcttgggcttccccccccccccacaagaaaaaaataaatgttcactaaatgagagatttagaatggttctgagtcttcccctgtaacatcatgtgttggagtcattccagtgcctccgttactccttatacaacgtggttcctaggttctcatcaccacgactttcttttgtgtccataccacttcaggcacagtaaatcataactttctttttacctgatgtttctggttgatttctagtaactatagggactcttgtcatgtcttgaccttctttttcaaatccaatgcgagtctttgtatttgcagttttaaatttacagcccgggtaagaagcctagcagcatcccaatcttttaaggttatttagaatgattgttttgtcatttgtcaagtagccatttcaggggagtggaggggacctcacagagacacagtggaagccaacactggaccgttctccaggtggcaggctctagagggttccatgagcttctctttcctggatcaggttgtgggagcagctgcaccatttcttggcacagggaagaagcaaacaagagcaaacagatgccagagaatgtggtaagttttaggcatcaggacttctggaagaagtcataagcccgaggcagaacacagagagaactgctctactctcagtaaacccatgagactttaggaagaaaaggaaaaaaattagaaaaatgataattcaccagacatggcattgtgttttttagtgttgtatcttttgcctacttgatattgtgacaaagattcggtttcccaagtccaacgttgtatgataatatcctgtgtttacaaatttctttcttctaggtttctgttttggttttggtgtggttactctttgtttgctttagtttacatgttttaccttctaaactttgagaatataatatacttagaacatttctctttttcttctctccaggctctcccatctgcccctccctgctctccttcacaagcatgaccttcctttttcactaattgttcttatacgtgcatagcttaaggagaatctcttcttttagcatagtgctacttgtttgtatatttttagagctgacatttggggcaccggataacaaattgccgcgctcttccctgggtaagagcactccggctcccaggtttcctcagtggcctgtagttctttgaggaggattgagacatagtgagacaggctttcccctgaccagtttaacagctgatgtcttacacggtggtacctacaaaataagaaagtgatttccttccagaaactgtaactcttacagataataagacttggacacttcaaaaatatgaaaaccttgagagaaaatataaacaaatgtgattgggtcattagacaaccaccaaacaggaagaaaggcagggacatttgtggacgatcttgaccaggagtcagttctgtgatgcctttgtgagggtgcacgtgtgacaagaaaatagactatatccatctataaaggctataatatacgtgcacacatatatacacatccttgggaaattacttagatcttttgccaactaaagtggtgctgttcaaggcatgattcaaattccatctgtttcaaggaaacaattgattctctaggtgtgcattctaagaagacctagttggtcctctgtgatatctatgtagaaaagtgacatttgatctgaggggtttttgtttgttctttggttggttggttgattttgggtttttcaagacagggtttctcagtgtagccctggctgtcctggaactcactctttagactaggctggcctcgaacttacaggaatcagcttacctctgcctgcttagtactgggattaatgctgtctgccatcagcacccaattgatcctagattttaacatgagttagtgactcctcaaagaatttgagaatacagatgttggcttagaggacttttcaaagagaacactgctggtgagaagattgagtttggggaaagagttttgcttattcaaagaataaaaatgctgtactaagcaatgaaaacagagtagcacaagctgagattaaagaaagtgataggggaacatggctttagagaatatattgagaaatttgaattgtctaagaccaagcaagaaaagccatcatgaaatttttagattggcatgacatgatcagcattgcaattagatttaaaaaaaaatcacccaaatgagtgtatggcagataaattaaaagggagtgaaaagccaaagtcaagcagtcaccagaaaagccacagcaatgatccaggtaagaggacggggtggtggaagaggtagaaacaggagctagaccaaccgaggctcgaggaccaagtgtccgggactaaatgggcaacgtctatggcttggccctcatccgttccagactaagacggggtatgaggaggaacctgtgttttgagtacagttggtttacagactcagtagatatccaaggacagggtaactgtgacacttggaagaaagcagtgggtgtgtatacatctaggagtgctccaggacatggaagttacagggacagtcatcaaaggcacaacgggagaagggtagataagagactcacattctggtttagtagtttaataatggagatgggggacagagggatgtcctgcgagaaaggaagaagcaaagaggtcctgtcatcatgatggctaagcgggacaaaagtttcggtaatggaggtgtcaattgtgtaaagctttatttttcttaaacatattagttagaattatttattttatttcatgacatttttgttttgcttgcgtgtatgtgtacttcttgcaggcttggttgacgtcagtggaggtccgaagagggcactagactcctggaactggagttgggaaccattacgcaggcactgcaaatccaagccctgtcctctgcaagagcaagttctctgtagctgctgagttaaaggcaagtattgaatgttttcaaattggtaaattaagctccctggctttagtagcgtgaaggttaatctctagtccccaattctgaatcccgcagtgatgcgcctacttaatgcaggatctccaagactgagcttgcgcaagcctatagtttccaaccttgtaaacacaaccccctgtctgcggtttgcaccgcacagcggcgccccaagtttcgcacgccgggtagggagcgcgcggaccaggaaggccaagcagccgaggggggggggacggtgcgctgatggaacagccggccaatctctgccgctgattggctgaggcggaaggaggcgggacgccctctagccttttttcctgcccggtactttcggttttcagcgccgagtctgtcaaagctccctggagacctccgggaccgcgcccctcagacccacttgggacactgctgagcggcgcagagagatttgcccagactcgagctcctgcgtgcagtgagtgagtgagagccaggtgcggatccgggtgcgggtgcgggtggaagtggggcgccctctcctcggacctggggtctgctgcccacaggtgacctgtcatcccgcagagagaacgccaggagccggatcgcttgcccaactcttggcgctgcttggctctcttatcctgccgttctcacttctagggtaaaatgacttgtgcaatagacatttctcccggaagacactgcaccttcccgcttaacctttgctcgccttgcctccagcccctttccaccactgtaacattttcttctttttgcagtcgtttcagctctgctccataccctgagccggcgccacgccgccgcgcatgcaactggcatataacttgctgtgtgtggtgattgcttgtgttgaatcccgaacctgcacccggagacagcccagtaagtctacgtgggaacggaagcatttggaatctcagtatgtatcagcccttaccggttttctgaaacttaaaggtggtatttaggttccgcagaaccactaatggtataatcactatctaaaatactcccgaacactacctaaaagtttagggataggtgaatggatgggtgaagattgcttttatctggcaggaatgacttgagccctgattgatcaatgaggactcagacttgtaggttcatcatggggtttgccttttgctttcctacgccttctgatacatacaaggtttcagcggaacaaacggttctgtgctcagtaacacttaggctatatgcccggcgctgtagggtccagaggacgctgatagcaaaatatatcccctcagaggctctgatgcgtgcagacagcaagcttcctgtggaaagttcatgcgctaaaaaccgtgcaaatggcagcctggtacaggccaaagaaagttatgtgtgggagggatagacagttttaggaagaagtaccatctatacggaattctgctagattgttggaaacaatgtggtctgtgcagaacgggctagaccgggaggatagaatgtttgttggaggcatgaaaacaggaaagagccaactccagactctgagccaggtgtttaaggactgtcttgccagtctcaggtttacagacatgccacagtggtgggctggagtcctttccaatggtatttgaaatggcggcttgctttgtagtgtagacatttccttattatcctttgaaggggcatttgtgcagcagacatgacttcattcctgcacatgagtgtttgaaaacaagtatttatccatacagtcccatatgctccatcagagtacagacctttcctcagaggtctggcgctactacagtctcccactctgaattgtggtggtgccattgtgtagtggtgtgtatcccgttacatgattgtcacaggtaacttgtttctatctcaagacttccttaatttagggattgctataatttttaacctttaggattacaatataaaaactgacttcatgtttatctgacgagacaaatattactttattctttcaaatggcatttggcaatgctgtatgaaaaaaaaagacatttctttttctgagccagtgactcactgtgtagcctcagaagcgctcagtattcatctcaggctgaccttgaacttgtggccttcttgcctcagctttcccaagtgctatgagttcaggtgtggtcttgaacatggcttactgcaggtagttctagctgtgcaagtatgagaacctgaatttggatcaccaacattcaaaagaaaaaaggcaggtatagtgacatgcctctgtgacttcagtgttggggagcacagagtttgctggcgagcttgtctcaaaaaaataaactggagaaaagattgaggctgatatcctgatactaactttgacctcgacatgtgtctgcctgtacaacaaacataaaacacattaaaaaaatcactattgagatttgggacttctttgtgccagatttattgtttactggaggcacaaaagaaaaactatttcttttaaaatgtgtttagcaaaaatactttatgaatcataactataaaatgtcaccttaatcgaaagagatggttcagtgggtagaaggtcttgctgccacactggaggacttgatcttgttcctaggactcccaggtggaaggaggaaacctgctcctgcaggccatcctctgacctccacgtatgtggtggggcacatgtgtacacatacccaagcgcacatacaataggtaaaatggaatagtcataaaataccagctttccaatgcactataacttgcagataaagctttaggaagtgcttgtgagctatcttaattctaataactacttgcttgattaaaaaagtatcaatttgttcttagaataatatttactggatacctaatttgtccgtgacattgttccatctccctttcttcagacaaaaaaaaaaaaaaaaaaaaaaaagagagagagataagaaggtacaagagggaatgtgtgatgggtcagggtgataaatacactggagaaaatcatatcggaaaaggggagtgttttctaaggcagagatggttagcatggaaataaactaccagagtatctgcctagacatttgagtaaacacctgagggtatattttctgtagaaggaaaaaaaaaaaaaaggtgattccaaaactcaacaaaaatattgggtatggatacgattcaggtaatgcttttcagaaaccaacaggatggaggttctcaacctgtgggtcacgacctccgtgacaaggctctagcctcgaaaatatttacattacaactcataaaacggcagttatgaagtagccccgagagtaatttaatggttgggctccccacagcatgaggagctgtactgacgggtccgggtgtcaggaaggttgagaggcactgggagagagagaggcttcgtctggagctgcagctatccgttcacacgcatgttctttctgcagaggatgtcacagtggttcgagcttcagcagctggactccaagttcctggagcaggtccaccagctgtacgatgacagtttccccatggaaatcagacagtacctggcccagtggctggaaaagcaagactggtaaggaaaactcgctggctagggagtagagttaatgccttaaaagtatttgttgatgaagtagcttggagatgtgtttacagaacgtgactatcaccagtggccataaaaccaaattctttagccattaagtactttccagtctgttttaaaacatattatttgcaaatggcaaaatttttaaatgatctgaaaatatttgacatagaaagctcagacccctgctgactcttttctttctggagataaataccacagacagttttttctgtacaaatgtctggcacttcctatacttttttcatgtcagttgtgtgtgatagaaacactacgcgaattgctaataaaacaaggtcaggttaaaacgcaaagctaaattcccgctgttgtagggagcacgctgcctatgatgtctcgtttgcgaccatccgcttccatgacctcctctcacagctggacgaccagtacagccgcttttctctggagaataatttcttgttgcagcacaacatacggaaaagcaagcgtaatctccaggtacggactggctttgagcctcacttgaagtgtctccgctgacttaaaaccttttctttatttggactcagcagcagatgctactgagtgcacgctcactgggcattgaaagaagttacagaagtacagatacactctctttatgtggctgatgtgtataaataaataacaatatcaattctttttataaacgcaaaagagttttcagggttaagttaaaaaaatggctaaaaattgttactattagagggatacaggactcacatgtgttactataatgcactgcagaatgttttgatttttaataaaccattgaaatgttcagaaaaaaaaattgttactatttacatcaaggcttcattttcagaacagtgagctatggtaacacattaagccccaagaaattccagtgatcagtttggtcttggtccttgtgggtccaagtgaagaatttccaggaaggtttggctccttcaagctttgctcgtaactgggtgactagactcgctttgctttgctcctggcagacttgttttccacggcaagagaaagccaaagagcgatctagaattcaggaccctcagctatgctcccagtacacacttggcctcactgccatgtttattctgcattgcagaattttctcattttaacagaaatgaaacacaaccaagcatttcaccctaggtaattgggagcattttcttttgttttgtttttggacctatctatgagtttatatcagtgagaagggacattagattacgtttgtaaaactttgctcttgtgcaggctgctcggtggcaacttggtttaaagagcatgagtgcagtactttgcaaaaatagctttgacagtgaaaacagaaaaattgagatgaatatctttgttctggttaaaagttcagttgtacttcagttcctgtgttgaggaattagttaaggactatcatggatagttcttatgttgtgtctatatcctaaaagaagataattgtcttcaagatgtgcaagaggatggatactagagtattgatgaagaagtgtaggtatgacacagggatcagagtgcatgtttagtctgcctgaagctttggctttggcatttaaatgtgatactgtccccaaccctcatgatccacgtgtgaaaagattttccttacacaagtcaggaatttattgataatacacttaaaaattatttttaaacaagtctctgatacacttgtaactctactgtttattaaaggtgaaatcaattttactactggttaatgaagtctctgtctaatataatacatttaaagctctattaacttgacactgaaggggacacttgcccatttgagcatatggctatggcaagccttgcccttcttctgaatcccccctgccttgctaaaatcccatagattacattctttaagccagtgcccaaggtctagttccttatttggccacttcttcctcctgaggctgactaccaaggtccagctatcaaagtattgaagtccagcaatcaacccccctttggctgccctaattaacatgctcaactaaagttaaacacctcatcctggtacagggtttctgtaatgggagttttggctacaccactctgaggcacctgcccaggagctatctcagatctgtggatgaaagacacacacattagctcagttttaacctgccttactggctcagtgtctgggttcttctaagcctcctgtggctagcgtgcccttacctttactccttgctcaacacctctgaatctgccctcagcttagttgcacaattaccttctgtgaagcccattggtcttgctgcccaaggtgcttttgggatgcccttctgtggtctgcttcccctttctgcctgcattttggaagatctcccctgcagttccgagtctgttctgtctctccttcaagaatctcgattcttttcctcctccctgctagcctgtgggaacctggaagtcctgcctctttctttctgccctgccattagccgctggcatctttattgattgatcaagaaccaattgggggcagagaccttcagaaccactcctctacaggtttcccctttacctttataaaaatcaccattttcctatgggccacatctgtctcttctctatccagaggcagacctttgtcccctcctaggataaatacccctccccctctcttgttcccttccccttctccctcatcctttttttcctgtctttgtctcttattccctgttctttgtccctctgagtcaaataaatctttgtgctgagaacttggtttaggagagtcccgagacaatactaatcactgcagttacaggtttggaatgacagtaggaacatatcaaaagctctgtttcctataagtaagccattatgttattataaggccagagatctttgtatgtagactcaaaccatgcagttaatcacatgcagaactattgaagaccctgtggctctgtgatgtatggaggcaggtgctgtgcacagcatccatggctgtgcaccaagtctgtggtggagttgaatggtgtagcccagaaagcactgccagtgtccaccctggactccttgtgtgtctgacttaattacccacagttctgcatatctgaaagcttttcactgttgccaagatttctatgatcctcaaattctattccgttatgacccacagttattctgcgatttaattttttcctaacctgtatctagtgtcctgcccagcaggacccagttattcgtgggtgccagggggaccgcaaacctggaagagaaatgggcagaagggaaagagaagcggagaccaaggaggggttcctgtcaaggtctcagtttattaggctgaaacgccaggttttaagcacacaacaagggaaatagagaggggttgaggggaattaacaaagaacaaagaagtgggcatctggggacctgaaggccgaattcagactgcaggtgggaggcactctgagtctatctctggaatgtagaatcccccttaacagccttgggtgtcaggctgggctcagcacataactcaggtccttggaagtcttgggagtcaggaagagataaggaagaggggactataattcagctttttacagcctcaattgccaggaagggaatagggaggagggggtgatgacgggctccttagcacaaggccatttggcttgttagggtgggagactgtgaaaggcttactttctcacagtatcgtctccaacaatctaggataacttccaagaagatcccgtacagatgtccatgatcatctacaactgtctgaaggaagaaaggaagattttggaaaatgcccaaagatttaatcaggtacttggttctcagtggacgctagtggttagaggtgcactgtctgcttcacaggtaatcccaaggcctctctcgagacacagagggatacacactctgattttataacttcaggaagcagaggcaatcagaaccagaagttttctagaactgagcattaagaaaggtcgttgtgtaatggagtccattcccagtgaggaaaatggcacgtgggtgtaagacgctaagagcaaagactatgcctcgttctttaggtcaaggttaggaaattctcctacagaaacggaagcaggtactcttgcaaaggggtggccatggaaggtatgctcagagttcatggcagtggggaaagcacataggtccaggctctgttctgtgacactgaataaccaaggatgactctacggctgtgacttaagtcacatgcacaatggtaatgctgtctgctgaaggagaagtcagagaaagacaggaaacagggtggccataggatacaacagatttggaaggggaggaaaaaactaacaggaaaataaagcttcatttttaaaaaacaggattaagacacttgtttataaatgtttatgacgtcaaacagcagatgtgtcagagttgtagtctgatgtctggggtcagggttttgccaggcatcctgtaggccttttcggcatctgagtgcagcgaggtttttgagttgcagtgacatttgtatttctttcttgatatgttcgagaacaacaagatgggcaggaaaccattatggtctgagttcctctgacacggccatttcagcagtggaaggggaatgcagaggacacagcaaagtctgtgcagataatgccaagtgaactgtgtcacagtggggaaagatggagaacaatgtaatgctgacgaagnnnnnnnnnnnnnnnnnnnnnnnnnnnnnnnnnnnnnnnnnnnnnnnnnnnnnnnnnnnnnnnnnnnnnnnnnnnnnnnnnnnnnnnnnnnnnnnnnnnnnnnnnnnnnnnnnnnnnnnnnnnnnnnnnnnnnnnnnnnnnnnnnnnnnnnnnnnnnnnnnnnnnnnnnnnnnnnnnnnnnnnnnnnnnnnnnnnnnnnnnnnnnnnnnnnnnnnnnnnnnnnnnnnnnnnnnnnnnnnnnnnnnnnnnnnnnnnnnnnnnnnnnnnnnnnnnnnnnnnnnnnnnnnnnnnnnnnnnnnnnnnnnnnnnnnnnnnnnnnnnnnnnnnnnnnnnnnnnnnnnnnnnnnnnnnnnnnnnnnnnnnnnnnnnnnnnnnnnnnnnnnnnnnnnnnnnnacccacccactccccctttttggccctggcgttcccctgtactggggcatataaagtttgcaagttcaaagggcctctctttccagtgatggccgactaggccatcttttgatacatatgcagctagagacaagagctccggggtactggttagttcacattgttgttccacctatagggttgcagttccctttagctccttgggtactttctctagctcctccattgggggccgtgtgacccatccaatagctgactgtgagcatccacttctgtgtttgctaggccccggcatagtctcacaagagagagctatatctgggtcctttcagcaaaatcttgctagtgtatgcaatggtgtcagtgtttggaagctgattatgggacggatccctggatatggcaatcactagatggtccatcctttcgtcacagctccaaattttgtctttgtaactccttccatgggtgttttgttcccatttctaggaaggggcaaagtgtccacactttggtcttcgttcttcttgagtttcatgtgtttagcaaattgtatcttatatcttgggtatcctaagtttctgggctaatatccacttatcagtgagtacatattgtgcgagttcctttgtgattgggttacctcactcagggtgatgccctccaggtccatccatttgcctaggaatttcataaattcattccttttaatagctgagtagtattccattgtgtaaatgtaccacattttctgtatccattcctctgttgaggggcatctgggttctttccatttttaatcatgggggaatcctcaccctaacagtaggcaaggaagggtctccttgtatttcagatagactagcaaggacggctggtagcagagcttggcagaaggatagactgccacctttgcagattggcatggcactcttcgcttttggctgtcagcctagagtgggcatagcagacaaccagagcaacctctgctctgtcacagcagccccaccctggctggtcactggaacttgaaggtttgcccgcttttgagctcctgttagaaagtccatggcctgtggagagctagcgttgagcctcccagatgaggagggttgagcactttgccaaggcctctttgggggtggggtggagtgggactccataaaatgggaggcccagcaggcaccttcccacagtgctctggtctaacagttctttgctatttcctcactgctgaggttaaggggttttcatccttacgtttgtataaacaggatgacaagccttgtttgtgatagaaagcaacgcagtttggaggacaaaggaatcggtggggtgtaaataaaacacttgcgtgtgtggctccaacaggtggaacaagttaaattcgcaaaattctgagtctgttcagagcatcccaagagcacaggattatgtagatatgttgacacagaaagcctgttactgttcttctgttccatgtatgcatgcctgtgtatgcatgcacctgcatgttgaggccagatgaagacatggacacatttgctggtttccttgtcaccctccaccttattcttttgagacaggatctctcattaaacctgcagttctccttaggtttacctggccatgacttctcgggatctgcttgtctctagtaacagttttagaaaacaaataagttacattacacacatttttctagaaggctctacatgcttcactgctttggatacttctatggttgcagtgttcctgggttgttaaaaggaaaataaaaacaaaagcaacaaaaaaacccacctcatctaaaactaatagtactgtaaaaagcgcagagttgtcttgatgatactggcattaagtgagatgatactggcattaagtgagtacctgtgtggtcccaaagaagccatttcttacaggacacaggggtagggcagaggagtggaggcaagatggaagtaccagagtcacgtgactggattgaagcaggagggttgcagggctccacctcactccccaggcttctccactaagcagcacacgcagtgaggcagatgtcagggagtgtatctcattcgtaacatgacctccacttccctggtctccttgggtaggcaggagctttcgtttggagccacacaaggaagtggctcaattctttgtggccagaggagcccctttcatcacatgttgatgtgacatatatacgggactgagggtgcccgtcctttgcacatacttctgatactgacagcagccagatgtctcatactcctcctgaaatgaaagaaaactttctgtggagcttgataacaatcagggcaggaaacagttacagaccagatttgcttatttgcttgtgaatgtgcatacaacatatgcaggaaaatcctagtgaaaaggcatggggcataattaagtgctacaattctgcatcatcaccaagtagggtttatgacaggggacaaaggcagaccatgactaggaaatccgttggtataatccactatcttactggatacctttgcttctcttcaaagatgttagaattggtggatttctcattgatgtactgagatacatgcatacatacatgcatgcatgcatacacacacacacacacacacacacacacacacacacacatttgtatcttcctcatgtcatcgtgttctacagacagtatttcactgaagtatgtcagaaacacacggtaatgctgactgctgtttccactgggattggtgccatgttggtggtacagttaatacaagaagacaattaaaagcacaagatcttttttaatttaattaaaaattagttctttagttaaagagataaattaaaagtaggaagatcaggagtttcaagtcacatagcatgtcgaaggccagccttgtctgtatgagataatttttaaaaattcaaaatccaaacaaaacaaaacacataagaattaagaacagcaaatacgagctttctctcggttaataattttttatatgatcttagtaaagatcgtagtctgttttctaatgctgtacgaactgaatatgaaatccacgtgaaatataagcgtgtaatgacaggaaggaatgcgtgggagcctacggcagtgcgtggggctagtgctgagcacactagagaccatgcacaaccctgcgtggctcagagggctagcgtgtgagtggacaaatgatgaggagcaggacagctgagaaacaaactcagatatgtgtagaaatcggtgttatcaaagcaccgggaaattgtatgcctcccacagaacgttgcacagacagctatatgattacattaaatataagcataaactttcagcttgtcttgataggtggttcgtacctataaccttaggactttggagggggagacacatggctcaggggttcaaggcattcttcagaatgtagtaaggtcaaggtttctctgggatacatgagactgtctcggaacaaaaggatacatttcaaatgttttatagatcttaggtcgacaaaggggcagctccgtggtgatgtttcacagtggagtaacggtcgtcgcaaacactatgtagccagaagccagtgtgtgctaagctgtgcatgatgcggagcggcttgccatgaagaaatgatacatgattgatgattgaggagattgatatgtttgctttgatgacgacatcacccagtggttgataagctgaaatgtcatgtgaccattactgtgtgcattttaaaactctgtccatcaattagtttaaaaagataatatataggatattttaaagggtaataaataaagagaaccgaaagcatagggaaaaatatgccaacttaaatcttttagttgggcaagctttcctaagatgaggtaaaaatctagtagggtctgtaccgtgaagggcaacagcaagctctgtcgatgggcatggttttcggtaggatctctgtgagtacagtttctaattcactactcaccgttgtgtccagaatattcctgacatttacctagctaatgtatcctatgtgaacaaaccagggtttgcccaaggtggacaaaggtgcagattcctaaatcttctgatcggtctgattattcccgggagagctgaggtttgtatttaatgtagattgtgtggttgagcaggggttccatggccctggatggccgtgctttttaatttcagtgtgcctctgagtcagtagggggagctcaaatggtacccagttaggacctgagtttgcatgtccagcaagctgtcaggtggaggtgcgacagatgtaaggaagacactttgaatcccaaggtcttaagcaacagttactgggctgtgtacatagtctgtgtgcggaatttggcaagccttaaataatggtgtcattaaacccactcgaattcgtggaaacgtgtacagccctcagcaggaatgtgcccacactcctgctgctttcttattagtttgccagcattttccaggtccttggaaggtgagattttttttttttgatacacatatggggagtctgtagtaagatttgcaatgtcttaaaataaggtgggccacaaggtatggcattgactttggaatgtaatcaagtgagtaaagataccagagaaaacgatggctgctaacagtgtgtttccctttaaaggcccaggagggaaatattcagaacactgtgatgttagataaacagaaggagctggacagtaaagtcagaaatgtgaaggatcaagtcatggtgagtactgacagaaggcctgcgtttgtctgtttatttctgtaactttggaagaagtttcagtttctctgagtattaacctagtagctaatagttgaaaagaaagatgattctaaagttctaaaccagaagaaagccagtcagctgcatgtcttataacctctgctttggcttctcagccctgagctgtttcttctttgtgggatcatgcagtcaaggttgactttgcactcattgtccaacaagctagatgctgcccttaccagcccgtgtatccacatttctcacagggcatccccggagttacagggggcttcaggataaacatgatccaccttctagagccctgttttaccctaagacttggaagacgaacaaaagccatttcatgcaaacatatctcaatacatttctgattagagtaagatgtttacagcaactttaagataaatccccaggatggtcgatggcagcaaatgactgagggaatcccctcgcagctaccccagctgagaggttcagtagtgtctgggtaacaggagcaaggcctggactcaggggctttggacagcacccttcataagcccagacgcatgcagcggctttcttctgcagcattagggaaatgctttactgacgtagaaataagtgaccctaatgtggaaataaccagggaaatcccgagcacagatatgtagaaatgtgaccagatcccagacaagtgaggcaaatttgaagtgtgagtgtatgatttctcatttaagctgagctgtgtctctgtaagaggaccctggtgagcacgccaggacttccccagtctccggcctgcctgctcagccttcttgtaaggggacggaggggctttccatgaacttgtgtttttccttttgtatgcttcacagtgagattcttgaagtcattcagagacattcaaatatgacgaggaagggcgggagagagctcatgggtcaaatgagcgtgaagacctgagtccagatgcccagagctcatttaataagctgtgtgtaggaaatgtcatctgtatctcaggtttacgatggcattactgatgtcactgaggccagctgcttagctccaggctccaggagggaccctgtcttgagggaacagcagagactgacagagagggatgcccaacattctcctctggcctccacatgaatgcacacacacacacacacacacacacacacacattgtacagagaaataaaaatttagaccctgaaccaggtggtatcagtttgaaaattttctacattttctaattttgataaatgatctttttattgttttaaatctattttagtattaaaaatataaggaacttgctcagcaggattaattactacatcacttagaaatcaatttctttctgcttcaggctaacttataagactctggggaagtatagacatacaacaaagaagacattctttttgagtacttaactaataataatgaaaagcggttttggtggtgaaatgaaatgaatgaaatgaaaacgattgtgctagaggttgcaatgaaaaggtgtccttactagtgaatgaagcaggcaggcggcatccaagggctgcaatttcagagtaacccaacatagttaatatttcttgaagtagatggtagaggacacgtttcatactagtttgtttcttgttaaatctaacaagtctacagacattcatttgcagaagaggtactcactcagagttgcctagagtcagtttcttcccagtcagttaaaataaaagtcgaaatgtccagatttaagtgacccactagtctccaaaatccacaaaatattcgtaacagataggccgagattaactctcccagtcactcctgactgtctcggtctttatgatgtagaggaacactaacaatgtatgaagcatgttatttctgccctttcgaagatggcggacgtgccgcttgtaggttagctcctagtgtggagggttgataagcgcctcaatgaacagaaaacacatttctcatttataatatcctgcttatttcgggtctgaacacggtgccaagaggtaaatgttttcctgccattgtacttaggatgtggcagtaatctcgattcaaggtaggcacaaaacacccgcatgtgctgggagagttggtgggcagtctgcacccacttgtgtcctccgaagtctccacttctgtcccatcggaatgaatgcatacaaacctctgagaagggtctttgactatttgaactgagtagtcctgatttggtattaggaatacagtggtgttcacagtcaggaactcgaggaacttgaccacggcagcttgtgtgaagctagtaggactagcctgtccttcttgtagctctggatatcccattcatctcctgagtgcggacagacgagtggcacccatagtgactcattcattcactttctagatcagtctagatcatccgccgtccacaaggtcacacgatcaagcttacttctgttcagtcactcttcgcacaaactcttctgtatctctctgagacctgggctcagcttcattagcacaggggcctgagacctacagacaggctgatacaattttttagtaacgcctacccccaaaatgactgtagttccataaggtcaggatgctgggaggagtggggtctgggctccccaccttaactctgtgctgtttcgtatcattccgccacagttaaattacccatgctaaaaccctttcctggtttctttttcttttctcatcttgatggttccatcagtaagggatgcactagggctaacctctcctcataccatgctcttagctggaagccacaggtttgttccaccctctgaaaaatgttcttacattcttattattgaaatattttgtgtaaaagattggagttctataaggatggtccatctttcagggtgttaggaaactcacttatatctttatctgcagtgcatagagcaggaaatcaagaccctagaagaattacaagatgaatatgactttaaatgcaaaacctctcagaacagaggtaagagtcccaacagcacccgttggctgctttttcccctgtgtacgttagtaaacatttatgttttccgatcgattgaccgctttgggcttcttgatgacctaggtcactgtgtttcaagcactgatttctgctgatggtttggaccagacattttcctttatagcactgtctggtgccttgcggtgtgaggctcatggcactaacctccaagccccagtagtgacaatcaaaattgtttccagtcattggcagatgtcttcaagggaggagaacaaagtatttgttggaaaagacagaaaagtacacaattggagtttctatgacctaacatccatgatgtggctgcagcattgtgttttattgtcgctgcatgttttttgtttttatttttttaatgataattgcaactaaaatgcttccagaaggccacctacagaacaccaggccctagcaatcacttagtcaacagggagagattattagtgtagcttggagctgtatgaggagaaagatccttagcttctacttcctggtgtgtctcctccctcaaagccatagacaggctttatacatactcacgtgacactttgcactttcttgtgttcatttaatcgaaactcggtcagcgacttaaatagtagatggtactatgtcaatttatgcgtgctggtgagaaatggcacttggtttaagcatggatgcacttaactgtttttaggatatatattggtacactcttgtcttcattcctttccctgttgccgtgagaagatactcggacaaaagcagcttaagggagctctagctacagttccaggtccagtgcatccctgtggagtagtcagcttgaaacagctgctcacactgcatccacaaacaggaagcagagagacacaaatgcgcacacggtagttaggctccctctttcccttctatagtcccggatccttccccagggactagtcgtgccctcagccaggtgggctttcccacatcagtcactgtaatcaaggtaatcccgcccaggcacggcaggagcctgtcacccagggattttagattctgtcaagtttatagttaacatcagactttgcgtttttatcatgtttgacccaagtttgtgtgaaccttggttttcgttggatttatcttctttgcacgttttagacttactccctgttccttcattcacagaaggtgaagccaatggtgtggcgaagagcgaccaaaaacaggaacagctgctgctccacaagatgtttttaatgcttgacaataagagaaaggtagcgaccgcttcccagtcatgaggcatacattatggactttaatttactgtttactttgtgtgtgagggcagagagcagaggacagctgtgtgacccctgggaatccagcttgggctcagcaagcaccacgaccaggctcatgggcttggaaaagttagggctctaaaaactttgcttagaacgccagcaaaataggaagagatacgtgctttgtttaaaataaacaaacaaacaaacaaacaaccctctcgaagttcagtagttgcacatgagtttattccaccttgttcttcctctccctttaggagataattcacaaaatcagagagttgctgaattccatcgagctcactcagaacactctgattaatgacgagctcgtggagtggaagcgaaggcagcagagcgcctgcatcgggggaccgcccaacgcctgcctggatcagctgcaaagctggtaaggttttccccggggtggaagattggcagctcatgtgtggaccacagacactgatggagagtgccttggggctggtgggcccggtcagcactgcactggagtcctggacatgctcagcttctcgccaccgagagcgtttggaaagcacagcagtccatgtggctgccgtcgtgtgcagctacgtctgcttgattgcctgattttgaccacacaaaaccacaaatgaatagtagttactgagcccactgaccaatttgagacctgatattaaaagcaaaatatctattcaggcagtggtaccacatggctttaatcccagcactcaggaagcagaaactctgtgagttcgaggccagcctggtctctgggtctatagagtgagttttagggcagctaaggctacacagaaaaaccctgtgtcaaaaaaaaaaaaaaaaatcggtcatctatccactaaataatctatgaatgttggctgaatggcaaacacttttctgggacttcaacacccaaaaagactgatttgggaggctttctcctcaagagctttgccctcctgggggtgaagggggtactttagggaaatggggaggaaatctttcagcaatcaattcatgtggcagagatacagaagcagcctgctgactggctggacaggagacagaagggagacacggcagcaagagccgctgtcgctctctgtggaagatcaagccctttgtggaactgccttcattcacttagctggcaccggagagcaaaagcgtgcttgtatcttcctccaggggctccattttctctgctcccttgtttattcaggagggtcacgggcggcagcctagaggacagaacagaaacaagtttcctgctagcaagttaatgtagtccccatggctggtctgtttcttccaggctgccccaatctcagtcccacacagtgtctctaagaggccttgccatggctgtacctgtccttacacagaaccttcagtggctccctggtgcctgaaggcatctgctttgccggtcttctgtgccctttccttttgaaaccccagattcttgaaagtctcggatcacctggagccctgccctgattgccttgctttgtttctcagttagggtctctattgctcggatgaagcaccatgaccaaaagcaatgtggggaggagagggtttatttcagcttaaaactcggaggttacactccatcactgagggaagtcgggccaggaacttaaaccaggaacctgaaagcaggacacaaaaacagaagccataaagaagtactgcctactggattgctgccccctggtttgctcagcctgctttcttatacacccctgaatagcctgctcagagttgccaccaaccgcaatgggctggggcttctcacatcagtcactaatttaaaaagcgctcccagacttggctgaggctgtctgatggaggcactttttcacttgaggctcctctcccagaaagctatagcttgtgtcaagttgacaaaaaacaaccaggatagtagctctcagaactgtgcagagagaggcctttggccatattgtaattcttcagggcatgccaagtgttttctataagtccctaagcttaatgcttccacaggcctccatctctccttgagtgtgaaggataatcccatgtgatgcccatagcatgtggagattctgtgactctctcatctagtgtgttttgggactgttgttcatggagaccccatgtcctgtaccctcccaggttcaccattgttgcagagaccctgcagcagatccgtcagcagcttaaaaagctggaggagttggaacagaaattcacctatgagcccgaccctattacaaaaaacaagcaggtgttgtcagatcgaaccttcctcctcttccagcagctcattcagaggtaaggctaggcagactgactatccagaaggccatctatggtcatttggacagtttggaagggtttgatggtggagcgtggagtttggctactctgttttggctctcagcagtggtcgtgcattccagacacctgcccaggaactctttggattcctgaatgaaacacacacacacacacacacattagcttatttttgaaatgccttggctactctagggctgggcagttccaatcctccatcggctgtactcctggctcaacatcttctaaatctacctttaactttgctgccctgttaccttctgtgaggcccgttggtctttgctgcccaggatgcttctgagcggcccttttgggagctgtcttttctttgctcctaccttttggatgatcttccctctgcagctctaaatctgatctgtctctctccccgagtcatggccattctgtttctccagcccccttcagcctagcctgtgcaaatataagggttttgccccatctccctttgcccagccattggccgctggcattttattgattgatcaaaaaccaattgagggcaaggactttcagtgtctggatacttagattactcaatcaattcaaagcattagaaccaattcccagtgtgacgggctaatcggttttcagtggcacttgattctgtgtgcatgccttgcttatgcacgtgcctcttccataaacttccttttggcttcctaggaacagtatagtagttcttactctttctgccccttagccagtatgtgccaggcccagcaagtctgacgtcagatgcctgccctcctctcgctgtacggtgtggcctgagcctgcaccaggctctcgcatcctgcctcccatcagcctttctcagcctttccccctaggttctgagacccacagcaggattttgatctggcccttcattacctggtaactgcgtgggggttcattacctggtaactgcgtggggtcttcagctacaccatcaggccccctttccacagtgacccataggccactctacacttgcagcccacgttacttctacccagtttgtcagactctcaaaatattactcaatgctccaatgtttttatagcctttcaagttttccgtctattgtctctgtagggagaagttactaatttatttttttactgtgttaactgtgatgcaaaagctaatttatctgtgtttccgggtcactgacagctccttcgtggtagaacgacagccgtgcatgcccactcacccgcagaggcccctggtcttgaagactggggtacagttcactgtcaagctgaggtaacgaacatagagctccatatgctgcctgtcccagaatttgtgcctttaatccgcccccttctttttttcatcccaacttgcttcaaatatataatactcctggctcagcttgccaagtgctggaatacatctagccctttcatttgcttttataaaatggttctagggtttgtgagatggctcaacggttaagagcaccgactgcttttctagaggtcctgagttcatttcccagcaaccacatggtggctcagaaccatctataatgggatctgatgccctcttctggtgtgtatgaagacagctacagtgtactcatatatacataaaaatgattaattttttttaaaggttctatagagtaatctagagaaaacaagtttggagtggccattttaatatgaaatcttactttggctagccaaggtttatgctcaaaatacaagtatagctaatatagtcgcatatacacatgggtgcctcttttttctcactgtaaatataggacatttttatagtaaaagaatctcagggtacggaacctcaaagtcggatcaagaacctcatgaccaaattttcagcacaacaaaaatgtatttgcaccagagggacagaggacagggataaggaacaaagacaggatatagaggaggagggaggaggggagaacaacagagaggggagaaggggaaaaatgagaggggcaggggtatttgtcccagattggaacaaagtactgtctctggacagagaggaggcacacgtggcccgtagtaaaatggaggcttaaaatggttaagggggaacccctatgttaggatgaggtgtttaattttaattggatatgttaattaggtgagccaaaggggcttttaattgctggacttgacttcaatacctagatagctggaccttgctagtcagcctcaggaggaggaagtggccaaataagggaatagaccttggtggccagctttaggaatgtaatctaacggtcttttgcaaggcagagcgaattgaggaacagggcaaagcctaccagagccatgtttgccacactcaagctggccagagtgccctctcttcgaatttcagaaatgtttatagataaagtttcaagcagccttccccagaggtgcataggctcatgatagagctttatgaatgctaggcagacactgcagtagtgtgtgagtgtagactgtgctgtatacattgttttttctggtgagcaaattcatatcttccaccaggctgtaccagtgttctgtgatctaaatgtctgtggacaactgcagtgacttacccatatgtatcctcccgtgattttgtacacgtgtccatgtttcacacttaggcgcatgtacataaacgtacggcttacagcatttcaagtgttaaaactaggatttcgtttgcatgcagtctgctcttgtccttgctacagtggtaggacgctccgggggtgctttgctgtgttctagagagtggctgcactcagtaattactgctcaggagccgagcagcctgcaagagctgggcttgtcttctgtggggtgctgctgtgggtacatggacactgtttctctgccaggcagccctatgacacacataaacaccagtggagtctagagttcataatgcacaggaaagaggaaggccactcctctcacctgctcctgaccagaggccccaagctcctccccaggtctctagctgtcagagcagaggcacatggagtcctttctacactctttctacatccctggtgccatcctgccgttttctgattatgggtagtagttgtaatttaatttcttggtgatgctttgtattttctcccaacagcacagggaattaaatataagttttgtaaagagtgatattcactttttttttgcccatatagatcagaagtggaaattttgattaaaactatgttggtgggttatatagaaaagcagctgtttgtactaatgtctgattagagtgtaaaatcagtgctgtgttctgttagagcttaatgttagaattgtcccagcattgccagctaggaactgattctaaaagccaaaaagctatataaacttgtcagttcatcttaacaaccataatctaaaagtggggagagtggtttatataaatgttcacagttggggaatttgcataataaataaattttagtcaatagctttggttaaggtaacaactgttatttttctttcaagactgttggtgaaattgcaagagctgaactataacttgaaagtgaaagtctcatttgacaagtaagatttctgtaatcttatctaagtagctatttaaaatgctagttctgtttacctctccgtcaaataagcaggctggaaattcttcccaggaccagggctgcactgtaggtcctgaggccatggcctgtgaggagaggcacctaatgggttacccagggccaaccctagcagacgttggtaactggcttctctctgaggattgggagctttgcctagaacatgtgctctctagactagaataaaccaaagagcaaacagaggaaaggagattgccttcatcaagtcttaaagcagttgggcgtcacacattacatctctctggccatccccagagaagatgcccttagtgcaacacactcaaagatccaggcatgtgcatctgtagccaagagggagggtgttcctggagtgaggttagagacatctggggcaggcgtgagggggagcgacaggggtaggtgtgaggcccagtggagcctgctgcattctcttatgtttagttgccagcactgaaggaaaaagaatgggaaaaacactatcttgttattttttctcaaaatcactccagatgacaggggaagagataaagcttagtggctttgtgatgtcctctcgtttctgggccaacagagcattgctgtctgtgggtcactagcgctgagacaggggacgtgcaattccctgagctccttcacctgttagccatttatgcctcacagtcccctgtagtgtagagctggcagcaggctgtgtgagggagaaatgccaggcaggtggcttcccacccatgacattcagtgttacttgatctcattggcgtgggtgggaaggaacaagtgattgaagggacagggaccacagtgtagatgagcccctattactctgtacatactttatgtgcatttatgagaccagtcttactctgcagcacactctggcctggaactcatggtcttctgcctctgtcttctgtgtgttgaagcgtaaaccacagggagtttccccccctcccccggcgcagccaatgtattcattttctcttttatttatatgactgtgtaatcatatgcatctgttttgtatctattgaatcttacttcaaatttacatatttttttacagagatgtgaacgagaaaaacacagttaaagggtaggtatagcatctgcaccctactttgcttatcctgtttgtttagtagtttgaagcactttaaggatttgtgtcttgcgttgtatagatttcggaagttcaacatcttgggtacgcacacaaaagtgatgaacatggaagaatccaccaacggaagtctggcagctgagttccgacacctggtaggcagagcagtttgatgtcttgatgcatctctggtcctttggaagtcttataggattgacccccatactttcccgacggtgggatgctggtcccttcttcatctcctgagtctcctggctgtgtgttttgacaggggctgtacggacctcagtagagtgctttataaacttgcatgtgcataaattatataagcacttgccgcctcctctgcgagcagcccctgaggttccagcagcattctaaggaaaccattccccacttcagtcctcacttctcctgccttccaagtgtgtagcagcttgaccacgaatgctgcaagagcaggaggcctcgttccattgggtagaagggtggtactttcctctggtctccataaacccagtgttggggctgggtaccagctggtgagctacagatttcagagctcgggagtgacatgtgaggcgagggcctccgtccagcttggaaatctgagcgtgtccagattggccctttaaatctcaaggattgaaatctgaacgaggagactaggtcagcctgctgtgctgagcctggtctggaagactgcagaggctggaagactgcagaagctgtttcgtgtgcctgggccatgaaatcgctgctgaaggtgctgggcacccattgcatgcaggagcagcagacctaggttctggggcgtcccctccctcagattactcacacttcgccaggcttcaggaagaggcacttccccctcttgttcctaggaggttgtcacacctttctttctagttatgactgggaactgatctgtgaataaacacatcaactctaatgattaacctgccattcggttccttcttttacagcaactgaaggaacagaaaaacgctgggaacagaactaatgaggtgagcatctctgggtggctagcgggtcctaacagaactgttctgttccgagaggacgcatcagcgtcctgggacctgatgtggaagagggctcggggtatctgtggggatgataaaaaacactctcctgtgtactttctggttgaaaggcagtttaacccacagtctcattggccctacaaagacagccaatcggacggggcgtggtgggctttcatattgttcacctgggtaaagaaatgaaggcccggacattagcatggtttcccccagaatgcacagaagagctggagaggctgaaggtgactgccttggttagggtttccactgctgcaaggaaacactgcgaacaaaagcaaatggggaggaaagtgtttatttggcttaacttccacattgtccattgctgaaggaagtcaggagagaaactcaagcagggaggaacatagaggcaggaggacatctggtttttgctactttgtgggttcttctttcttccaccctttttaaacctcaccctttcaaccccctaacactagataagagagagagaagaaaaaggatagagaggaagggaaagagatcccagaataaagtcgggcttggaaagttggagtgatgttattgttagactacttcctgcggattcgaggctcctcagggccctagcatttatttatcctctgaaacttcccagaatttcaaatgtcacacgattgcagaaactatctctagctggcagaattgtgcttcttctgctatagcatgaggcacgtcagtcagctgccgaggacagtcccaagcagccccgtgtccccctacctggagcttaaacgaagacatactcagaatatttctgtgttttttttaaaaagaaaccaaaatttcagaattttcactccatgggagctgatgcagaggctacggaggggtgctgcttactggcttgcttcctctagtttgctcagcctgctctcttatagaacccagtccagggatggcaccgccacccacagtgggctgggccctccccatcaatcaccaattaagaaaatgccatatagctgaaccttataggggcactgcctgaattgaggtaccctcctctcggataactcttgcttgtgtcgggttgacaggaagttagccagcacggtgactgagtctgaagatctagtgttgccgacggttccctgccattgcatcccctacaccgtagcattgctttgtcatagatcctgtttttacaacctggaccttagaagttatgttcttgatgactgaaaaatgagaaatggttgggcatggtagtgcaggcctttaatcccagcagttgggaggcagaggcaggggaatctctgagttgaaggccagcctggcctacagagttccaggacaaccagggctgttacatagagaaaccctttctcagagagaggggacttgggggtaagaaaataaggggatgagagatgaacggagggatagtctgggcctgggttggtttgaaattgtccttggagcacacgttgttggctgacgttccatttcacgaccactggaggtcactgcagctacaagacaaatgctggtctgtgcagcccagacatcgcctccttcgcagtctttgtcaccttctaggtctagcagctatctctatagttccaagatggtgtgacacagaagagctgtgtatggaagtcactttgaaactatccctttctagcaaaccagagcacttaggatcaaacatatgtgggttagcactttcaggagaggctctgactattaagacccaccctcacttccactgcccctgccaggtgtgcagtctgtgggagccggcagatggctggaggtcaaggggtcatagctcgtggataaacccacttgtagttgccacttttcccactggcgtttctgtctctgaacacataatccttgccataattacaaacgcctttgagggaacaccaggaagcttgggatagtaaaatctgggtattattgagttctgaagtccaagttctggatcacagctggtttgaggatctctacaacctatttgggttttgagagctcttttctttttgttttggaaggggcctctcattgtcaccgaagaacttcactctcttagctttgaaacccagttgtgccagccaggcttggtgattgacctggaggtaagagttacagtttcctgagggagaaaacatgctatctttacttccacaaaggcttattttttcagtttttatttcagccttatttacctaattgttaaaaaataggatccctttaaaattatcaatatttaaaaacttttctgtgtatggatgttttatctgcatgtatgtctgtacaccacatgtatgtgtggtgcctgcagaggccggaagagggcatcagatcccctgggacccaagttacagacagctataagccaccatgtgagtgttaggaatcaaacttggggcccctggaagatcaggcagtgcccttaactactgaaccatctctcttctccccaaagtggtcttttccagctaatactatgttgacgttaatgatctaggaagctggagagttggactaaccttaaaattttgcaaaagaaatgtcctgattgtgctagctagccactgttgagtgtttagctactagaagggagcttgaaatgattccaaggtctttgttccctttcagaccacctctcttcctgtcgtggtgatctccaacgtcagccagctccccagtggctgggcgtctatcctgtggtacaacatgctggtgacagagcccagggtatggaaaacacatgtgctttagtacggttaaccaaggctgctgctgctgctgctgctgcctgctcccatcactagatgttggggaagatagtcccaagccccgtggcaccagtgaggaccttgtgtgatgggaaaatagtcacacgtatgtgccaggcacgggaacagtgatttttccaactcaggcagtcgatggctttatttttctggctgtccttctgtgttgcttgctttaaaatgtatgcacttgttaaatggacatgcattttcttagagcaggaagacactgcagactggtccgttggttctcattaggaaatactgtgttctgtaaagtagtcaggagctctggttaatcaaatacaggatcattgctcccaggggaaaatttagagctcagcttctgtaacccttgagtcgcagcattcttggcagcccatgtataggtaacgtgagtgtgtttctttttaaaggcaccttatctagtctgtctggcgacttgttacaccataccacgtgcctgagtgaagcttatactctctccatgatgtccccccccaatgcctagcgccattttaaacaatgaagtcataacaaaaatcacaaaaatgtgaaaaacagagaggccaagataattgtgcgctgcaacaaaaagctaggatgttgttttgttctatcttagccaggaacatcaatctggggccacaaacttgcctcaagtattgattttggagttataaataaatagactcacaagcgtgaacctgctaatttctgaggattctcatccccggctgtgactgcctgtgtgtcacagaaaccagcagtgagctctggggcaggctgtgtctgtggcaggtggctcctttgtaactccagcctctgggtgttttctctgcagaatctctccttcttcctgaaccccccgtgcgcgtggtggtcccagctctcagaggtgttgagttggcagttttcatcagtcaccaagagaggtctgaacgcagaccagctgagcatgctgggagagaagctgctgggtatggttggacacgcacccacaagtcagccttctccttcagtcattccttattctgatgcttagaggtacaagagtgctaaaaaaaatcagttggtttttaactacagctggttgtagccaagtgagatcaaggctttgaaaacaccattgagtcctggtaaaggaacaatgacccttgttctcttatgtctgagccaggatcttaaagagaaattcttaaattatgagcctgaaataagatattgatgagaaagatgagctcttaacgtccttagaagtaaaagaggaaagtcccttacataataaagttctgggcttaaaaaccccaggatcttgtgctggctgggcccttgttgcaggaggcagagccacagttttgtctgatcaggcatctggcccgtggcagacagttctctctcagtggctaatgtcagaaggcttattcatcttctacaatgaaaagtcaaagcctcccttatcaccgacaacctgccaatgaaccggatatctgaagcatgtctttaaaattccatcaataccgttgtccaggtttgcggtctgtgtagcagggtgatgcagacggtagtcgaagtgggtctttcttaactgaatgtccctggaagggtcttcactcacttgtgcacattaacaagggtctcagaccttgttctgtattccacatttggtgagatacaaggatttttttttccctgcttgttgtagcgtatcagtggtttcccttaaacaaagtagtggacttaacacagctcagaccacatgctgcattaattcatatggctaattatatttatggcttgtatcagtttgaacaactgtccaatttgtgagaaggctgagggatatatctaagtacagtgagcttataaaatccaccggagatctcggccttatttggaactgcacatttgttctgcagggcttttggtggggagggacttcatgtaggcagaggaacagcgggaagtggtgctgggtagagacaagggtggcttctccacagagccttcagggagacaggggtcatgccaaagtcagatcagcctggaagggcgtgtcctggggtggggtttatagagctctgcctgctctctgggaaaggagctaagaggcaccagatggctggcttgatgtcagcttcctctgcgctttcataatccgatctcagtaatcctccatgcattccttcatgctgttggaatcaaaccaacagacagcagcatggtggtgcgcatctgtcatctcaggctggcggagtcggaggcaaggatgggaagcaaggagtttgaggcctgactgagctacacggggagaccctgcctataaataaagggggtgaaacaaagccaccattcgtaggttttaaactgcttgttggtcctttcagcctgtgtaactagaggcccatttcaagttaatatacgagagaatatcacctctgctgtagtcaccctttgcaatagatacaagagctctcagtccaactagagcagcagatcaatttctgtttggtaaaaaggcgatttttgtttgtttgttcgtttttgtgtttgtttctaggccctaatgctggccctgatggtcttattccatggacaaggttttgtaaggtgggtcctccctgggttgtttgcttactctggcatgttcatgtgtccccctcacacccactaggacaagttgtttaccttcctacagggcaggaggttggtctgcaagcagagaccgaccgagaccagccggcaggaagcacctgcctgagtgataacactctcccacatccctcgccccagcctcttaatcagcagggctctggctaaggccgtgggaaccgtgcacggagcagttgtgcagagctaccccagctcgagggcacctgcacagggtggtgagaccctgcacggttcgccagcaggagctgagctgctcatgctggcttctgctacagtgagcacactcttgttttccagtcatctgggaagtcacctttgccgggtgctgctcttgggaaagggagccaaggagggagaagctctagcaagtcagaaagaggcagggggagccagccaggcatttccactcaggaacgactgcccctcttgcttgatctggggtctctttggaggggcagggcaaagcagtgctttggttaaccaattgtgcatttgtatacttgcaggaaaatattaatgataaaaatttctccttctggccttggattgacaccatcctagagctcattaagaagcacctgctgtgcctctggaatgatgggtaagcgtccctgagcgctccgaaggctgggacagagtgccggccggccttcaggatttggcaggggttttgctcagagatgcacacttacctggtataaggctccttgaaaggacaccctcaggagattaagcatgtcttaggatatctatatttagatctatctatttaaaagctaaattaaaaacaaaaacctcttagtgtcattaatgtatttattcattctcacaaacattgtcagtatttactgtactgccctaataaagaatcagaaaccaccagatggggcagtgcagatctttaacttcagctgaggctgaggctgaggcaggctgatctctgctcgtagcacagcaagctccaggcagccacggctgacagtgagactcagtcttttttgttaaaaggaaggaaggaaggagagaaggagagggaagggaagagaagggaagaaggaaggagacagaaggaaagagagaaagagaaaagtgtttagctcattcagtccagggatcaactgatatctccggggttcctgtcagttgaccagcagtgatggtgtctgaagcgctgttacctgaggctgcgtccccagtacaagatgcataggcagacactgtcatgcgtggtgtttaaagtcagcaagtaacagcagacgacgacgcattgcctgtttaccaagccacaccccagtcggtgttcatcctgattcctacttagcacatgtatctataagtgagatgctccctttaagtgccagttaagcattttgaaagcatacattttcatagtatgttctcttgtcaggcggcagcaggtttcttagactgtaagtcaaaatggaaaattaaattcacgagggaaacacaaagcgtctccattcatctctttaatacccaggtgcattatgggcttcatcagcaaggagcgagaacgcgctctgctcaaggaccagcagccagggacgttcctgcttagattcagtgagagctcccgggaaggggccatcacattcacatgggtggaacggtcccagaacggaggtggtgagtgaagggtctccctcatgccgccctgccacacatgtctgtaatctgtcgctgaggatcagcccgttggaatagctgtggaaaggaagtagcatatcctataatcacacagcctggctctccatagagacttaaagcagtgtgaacactggcgataggctgcccggaaacgtgttgtggaaatgatgcatttcaaagcaaggccaagtttttcctttctctcagggttacggcctgcagatcaaggatgtgaatcaatcctgtctgctcccagttgtcggaaagaatcacatttcccacagtgtacgacttcagactcgactcagcctagaataaagtgcccgtgtgaggacaggctttgtgagatgcatccctgcagggacggctagagtgaggtgcaagcagaggagctgtcccttcatctctgccgtatactagatttctagttaaccaagtgactaaagcactccaaaatcatggtattatacaggttgaacagaacagacgggaagagcaatttaacaaactaatagttgcttatggcttgcttggagaacatagggaaagctgggtgtcctaggactttctgttttctttggatagattcagaaaagatagtcttgtgattctactgatcttttccaatgaaacaggaggtctggaatcaggacctaatgcaggcagtgggcactgaggtctgcctgctttcctttttcctggtggttcatttcccctgagggatggggctgagaaactgatcaagggggaaagcactttgcagccaggaaagctcaagcagggcagcaccagctacagggatttaggcagtaggatagttagtggggaagagacgggtgggggtgggggagggggggatggagaacccaagctcggaggagcagtgcacacccagaggtggggatctgggctccaaacaggagcgaactgaagcacagcacattccctggagggctggagggaagaacagcgcgcagcatcttggtttcctttcaagaattgcttgttctaataaaacagtgtttgtctatcttaaaggaaaagcagaaagcgagccgatctttaatgacctgatctgtagcctgagcttagttgtgtgtgtgtgtgtgtgtgtgtgtgtgtgtgtgagagagagagagagagagagagagagagagagagagagagattatctatctgcagacaggccttgctttgcttaagattgaaagcttttagagaagtttgggctagagttagcccctgatgggacatggatatccacaagaatgttgttactaaatagtgaagaccgtgtttggttttcctccttttaaagcaggagtgtgatgcctttaaaaaagtatggcaggctctctgactccccctgggctgtgtctgccttgctttagtggtctctggggcgcctgggactcactggacctcactggtttcctccttgtagaacctgacttccatgccgtggagccctacacgaaaaaagaactttcagctgttactttcccagatattattcgcaactacaaagtcatggctgccgagaacataccagagaatcccctgaagtatctgtaccccaatattgacaaagaccacgcctttgggaagtattattccagaccaaaggaaggtgagtgcctgagcgatctggggtgcctgtgggggagagtgcagcaaggcccttcctggtgctccatggctcccagacaagttaataaacacattggtcctcgctatgctgctatgggtggattgtagtggcacaaatgccaactgtagcattatcaaactattgttctcttgaattaatgaaatgggcttttaaaaacgcagcataaacacaatagagttgaaatgtattgattggcctaatgaggctattaagagataaataggcatttctgttttaggatattagtaaagtctgtttctggtcttgtatatttgttattacttcttccatataaatggaataaagggtaagacccaaggctaactgatttcttctagcctgcttgggttaaaatggagggaactgaggtccaggatcagtgagtggcccactcaggtaggctcagttacttgtgggaacctgttgttgttagtgactgactatacgaacaggaagcctcttatggtacaagtctgcctcccaggtcgtggtgggattacatttggaaaagttcaagttagatccctccagctttgccacaaagctaatagctttatggaatccaaagtctcgctctcggtactttaaccctgcagcgaggatgcccatagaccagccccagggctgtgcatactccatcagctagaccagagacacctttgcacacatgggcttcgttcaccttgtaggatttcaagccttgggaagagactcctagctctttcctggtggtttctccattcccactaggatttcagttgacttaagcaggcaggtcaggaccccacagaatttcaggacattctgtgggatcatgatctgtcaagcaaatctgagttgatccctcagagtgactgttctgtccctgtgtgatttctgctaatgtgaagtgtacacggtgtgcttgctcgtagcaccagaaccgatggagcttgacgaccctaagcgaactggatacatcaagactgagttgatttctgtgtctgaagtgtaagtgagcacagaagactggcttgttcaggaccgcaggccagccccgtccctggctgcggtccattgattgcactggctcatggctcatggcttgctttcccaatgtaactgatgttgccaccacagttggacattctggaaagtttgtaactagtcctggtgtcaatgcttactggcattttattgccatgagataaaaaaaaacaaacaaacaaaaaaaaaaaacagcagcaacaacgcaccagccaaactcacaataaacaaaaatgaaacaaagttgtatgtgaggacttcccaaactgacactttgaaaaaaaaaaaagcatgaataaaaaagaaaaaccaaaacttgatgagtgggaaagcagttcttttcaagcaaaggccaaagtcggaactggggtccattttctccacctgctttgattctgtcatttcattccgtagaaggtagaaagtgctggaaaagtcattgtcagttatttgcttgcggcactgtctgggggtgaatggatgtagccttcatgtagaaccctgtggagcagccttatctgcatagacctcaaggtagggaggagggatccccagacatctctcggtgcttttctgtccagggtgagcctcgagagtccaccacctcaggatgccaccgcacatgttcccactgaggctccccaggcagcagcgacgtctggcgagggctgtctctaaagtctagtgttacccaaggggccgggctgggaacattaaccgtccgtgagctgtactctgtgtgagctatgttttataaagtgtacgtttttcttgaaataagactacgaactgatcgctcagtctcagatagagaaagtgtctcggcttgcactgcggcctacagaactcaggtgttgaccctgtcctttcccctctctgttccagccacccttctagacttcagaccacagacaacctgcttcccatgtctccagaggagtttgatgagatgtcccggatagtgggccccgaatttgacagtatggtgagtactatggcaggggtatttccaccttggggaagcctgaggcaggctggtactgcatcgggctgctgtgaggagctcagagaaggcctttatttatattttgttttattttactttttaaaagaaaagcttgtgtgtaagctagctgtttcatcagcaggattttatccctagcatttcagattcctgtccgctgttaggcagaaagctcacacactaaggggtcgaggttgttttcagaggtagacattttcccgtggctgctgtgtctgtctgggcccgagtgaaggattgatcttagggaaggatggctgcctgtcggtcacattggctacacgagcggtgatgaacagttccgactctgtcacatctcagagcaaactcattctgccagcctctgaggctgtcaaggacttgggcagaatgaacggctcggatagtgactcactgtgtctccctgcctaaatagaaatatgtgtttgcaaaagagaaacatctccttttgggagactgtttctcagcagattcaacagcagcgtttccctttcagcctgggactcttcctcccacggacaggcttgttcaggtgactgcggtcttgctgatgctgcctaaatttaagctcttttccacatgaattcaatccagttcacctttcaaagcttgcctaatgctttcgaaaagaactcccttagctatcgcaggcctttcttcatcaccaggtgccctgtgcatagcacaaacgtgttcaggaatgagagggaaggtcagaggaggggccgggagagaggcttgggagcgggtgggtaaagcttcatgcgtacatgttcatgtgctggggcatgctagggtgtaacctcagtgatgggtgtttttcccgtgtgactttgtgttcttcacctcaccaagcacactaaaactcttagaaaacaccttctcatagctttcggactcttgagccttgctagtgtgatcacggaatagctcttttcttgataaaataaggctctggtccatggaacctagcaccctgttatttctgtgaaaaaaaaatttgtctcctatgaaaatggagtaatggcaaagcctgattcagaaaatgtaaaatagatcgaagggtcctgaacacagggtgagcttttacaatccttgctcagaaagtcacctcgccatcgccaccattgataggtcatgcctgtcaagcttctcccatgcaccaggcagaatctatttgcatctgttaaggtgaggagcctgtgactggaacttggcgtgtggcattctaactgtcatcaccattgttgtttgtgaccagagaactaagctgttagttcctccgtttgtgcaaagagcgctgctttcagtatgctggaaggtgatatcatggggcctttgacaccctcaaacaaattccaggaaacgggtttgtagtctttggacaccccctgtagctattctattccagtgggttttttgtttaatctatggaataaagatatacagatacaataaattagcaaatgtccactcatcgcagtagtctccagatgaacccccaacaatctcaggggctctagcaggggccctactcttagaccagggaagaatgagatgggcctgtcaagtcaccgtaacgccaccacgatgtgctctgtcctcgagcttattcttgacttctgtccaacatttgcttttggaattatagcatatgagctaagtgagatgactctgtctgtaatccaggcagtcaggaggctgagacaggaaggtctcctggtggaggccacacagggctacatcctctgtcacaaaataagcaaatggaattagttgtgtgctctgaggtggaggtggcccatgggctaaaaaggtagtcagggttgatggttggtccagccttggctctcaggctccagaggaattgtgcacgagggccagtataccagcgctgctctctgtaatatgacttgggtatttatttagtctaacatttccatacaagtccctatggactggaatagacctagcctactttcctagaggcctttgcccagagctcatattaacagattgtctactatttttcttctgttgtattggacattttatacatgctttcagactttatactttgaccagaccttatgtgttaggcactgttagccaacttcgcacatgaagaacttgaggttaacagaggttagtaagccagtcacatagttagaggatatgggtgcaggttgtgttcatctctctctcctcttctcccctgcttctacagtacaccattttatagaatggtgccatcggccacactgcaactggaggcaaacccttcaacatgcttttcagtctaaaattgctttcctaaaactcaagaggctttctttgcaatctagcggtgtgtttgtgttggggcactcaagggttacagaattctccactgtggtgctgtcctataccctgaaggacgtttagcagcaccctggcctctactctctagaatacctgatgccaatagcacacacatgcccataccctgcaacagctgggtcagaaatgccttcagagcggcccgccgaggaacagagccacctctaagacatctggaactgcaccaacatggaagtcagagtcaggggcaggccagtgttctatgaggaacactttgctgactcctgtatccagggcagctcgcagactagggagggagctgaggcgcttgacagtgattttacttctgatttactggcccacgtctgaaacactggctttgcttagtttgcttactcagtggcctttaagggaaggtcatcaattccctccccccgcaccccccccccaccccggcacatggctcagcatttcctcacaccgttttgaatgagccgaattgccgtgctgctgtccccagacttgcataacagcagaaagctttatatagtgtgtctgggatgagtcacagcattaatccaggaggccagacagtaataacccatcagtttaggtggtgtaaaaggccctgattagttccagaagaatgagaggacgcactagcccttctggttccatggtggtggtttgctgtagggggcattctcctgctcgctattctagggagggcaatggtgtgaaatgcatgaatcacatgtcccaaagtccgtgtactgaacctacctacattctgtctcttgcagatgagcacagtataaacacgaatttctctctggcgacatttttttcccatctgtgattccttcctgctactgttccttcatatgcagtatttctagggaaatgcaagaaagaaagagcatcacatttgctgagcactgctggtagaaagtggatatttctctaattagaaacctgttactctgaaggacttcatgcatcttactgaaggtgaaatggaaagtcacttaacacaaaatggattttgtaaacaaagaccaagagatccacccaagcaccaggactagagtgcgagtatttggggcaaggtgaggagaacggtcactttagtaatggtctgtaatcagtgcccaagtgctgcacatcactggaaagagacatacttatgggggaggggccttcttgatggaggaatgtttctgtcccgggagacattggcacttcccctctcctggatggccggaagtcttccactgttttacatatggcacagttcaaagtcaactttagatccaatgctctatcaaactatagtgggcatccttcatgtgagtgggaagaaaacaaccgtgctccttactgcagcttctgccaaggcatggttgctctcctcagggactagctttgttggtggcaatggctacacaaaactaaacaccaacagaagtaagaccattttcatgagtactccatcaagttaaagggtttttgttgtctttttggtcatggattgaataaaattgtctttgcacatccattaagggggccagctttcttaaagcaatttttctttttttttaactaaaattagatataggtgaactcatgttttttagtgggctgaacttatcggttttagctggttgtcttaattagccataaacttggagaaagcagtgacttcttgaatccttagccaaatatgagtatcagataattttattatttttttttcgagacagggtttctctgtgtagccctggctattctggaactcactctgtagatcaggctggcctggaactcagaaatccgcctgtctctgcctcccgagtgctgggattaaaggtgtgcaccaccaatgcctggtgagataactttaaagaactccctataaatgcatgagaaccactgttactgatgaatgtggttttttgacaactacattcacaaatggcctgtcttgtgttttgtcaccgttttgagggatgatgttttgtggcacgtgtgtgatcacagcctgatggttctggtcgtgggttggttcttctgggccagctttcacagactgctgcgcagctgcacctacagtgctgccccataatactgtttcactttggtgaagatcagcccaccttacaccccgagtgcaggtgtgaaccacggtaagtgtgcacagtccttagggaaaacagggacgcagaggcctgcctcctctcttttccatgccaaaatgaaatgaccaagaaacaaaacatttaaaaagttgtttctaaatgctgagacctaaccattgcttatatactgttgtctgttgaaacagtttgttacaatttcattctgttgaactaggtgagactttaagaaatgttgaaattatgttaatttcctattattatttaatataaagatatttaaaatgtctagtgttatgagttggtttaatatatatctcatgtatgtatcagtcctattttaagcgctttttaaaaaagacttgtttaggtatatattttatgtatatgggtgttttatctgaatgtatggacaccagaagagagcactgggtcccatgagactacagtcaaatgggatcacagtcagatgcaattttgagctgccatgtgggtgctgggatttgaactcagggcctctggaagaacagccagtgcttttaactgctgaaccatctcttgggacgcctatgggtcctattttaaaggaagaccgatatttcccaagtgtcacccttgcttactctactgcagacacaggaactatggcagtttaaggtaggtcagcgggcaggcccagcggtgaggcctctctgaggtagaggcctggggatcaggcgtttagtcattcaaggccggcagggctccatgggatcacatccaagtcagggcaagacatccacttacactttcaggtagctgcctgttagacgtcaccaagcatgtcctagcttaagtatgacgaggatggcattttctaagtacagagcatatatgtagcacttgggataagctgatctagggacttcctgaggcggcagagcttaaagtggactccattgactgcttggagactactgtggaatgaaggcatgtctcagtaaacagaacaaacctgtggcatctgtctgcctcagggaggcatcagacaaagctggaaaggatttagaaaattcttttacctactctgggagctgggaggctgtccttcatcccgagggcattatttatctgaaggcatcttttgtttaagattcattcatttgttcctcaaatatgttcagtgcctgccttgcaccaggcactattctagatgcgttgaaggcactaataaaagaaatgcctcacagttgtaagcgtaagatgttctaagacactgggccatatgctcaacatagtcactttacccatgaaagctttgtagggatcttgtgaagcaaaaacagccaaaagggagctggggagctgggtcagcagctcagagcacttgttgctcttgcagtagattcaggctcagcagtcccgcacccacaaggattcacggtggctcacaatcatttataactcctgctccaggggatctgatgccttcttctgacctccatgggcaccaggcactcacatggacatacacacacaaatgcaaaaaacaatggccttaatgactactaagcctagactctcttttttttttagatttatttatttatttatttattatatgtgtgtacactgtagctgtcttcagacactccagaagatggcatcagattttgttacggatggttgtgagccaccatgtggttgctgggatttgaactcgggaactttggaagagcagtcggcgctcttaaccactgagccatcttgccagccccgcctagactcttctaaccccaaacacatacacacctgctaacttatgaactcagtcctttcacacgcagaagcacctaagtgccacccagtaagtacatctgtgggccatttccttcaacgtccatggattatgaacttactcatataaaatcaacctaaccttctaaaagataccacaaaaagagaatgatcaatatattaacaaatgtaacttttcactactggggttatctgtgtgctccatctgcagataaacatgtgtgcggtaggagctgacttaggtttcagaacttaacaatgcagccgtcatgcctggccccaaaactcacctgagaggctttagccagttatgagtaagctaatatgcgtaagtgaagatgttagctgtaactctgtgttaggggtcagggagacaatatgggagtaagagttccatactgtggtccgctcttggatcccatcttcatcagtaaaagcatgggttagaattccacatgccatttcaaattctaaatatcagtaatagagatggcctgacagagctcctaaaaccaagcagctttgtggaatataacttctataagatgaagatggggttggtatggcgtgcacataactgctgtggagttaaaagctaactttacacccaagaggaaatgtttcgccaagaacagggcttttgggtattgattgaaagcatgtgaagaattcggggggagctccagccagtgcaactcagatcccagtgtgatcggattggaccagctctcgaggtagatttcagtgctctgtggaaacatgtcttcattcaaggatactttccatggcatggtgtaagagcatggtctgagcttctagaggactgagctagcctgtccacttctaaccttcacagctaggtcttcagttctcatcttggtcttgtggtccaaacttcccacccaattctatgtgcctgcctcacagcaggctggatgtaaaccagctacagacttccaacccaacagcccagagaaaaccttagttattaaaaaagaaaacactttttctcatagtttgttttcaatacacatatttattatgctgtaaaaagcaacactacctgatctcatttaaaataagtatttcccaattccagaatacttgcaatttatagttttcattttgggaaatgttggaagtaaatacattcatagttgtggactccccagcagggatctacatcaaacatcaggttatcaagtccctgacggacagctggatcaacagtatacccagctctacagctaaagcacgtgtaggcagcactggggtatagcatatcaccagacaggggtgtcagaaccaagacagcagaaacagtggcataaaaagatcttcaaagcaacatgatcatgtaatggttccaggatacagaaaaattagctaagattgtaaagccaaaacaaacagatctttggagtttacagatggtagcagttagcggctcattcacacacacacagggtccttgttattatcagccagtagcgaacagccagagcaagacctggcacaggaaagagcatactcaaccaagccacagagactgtacaaaacagcactgagctgagagaagatgaaaacacctgtctcaaagaatatacagaaccatgactggaggggatcctcagtcactggcaatatttaagttactgaatcacaaaaagccagccgctattgaaatagcattatctcagttgattccaaaaaaaccatgttcacccattaattttggaggttgtccctgcgtaggatgttcccagtgccacctatgcacctgtcttgagggggtgtggaagaagcaacatagcaacagggctggctgcccacccaccatcctccccacagactctggaacttagaaacacactcatggtgcctgtcctagtgaaggaacattagccacagtttcatcaagggtggagctggctagggaatggagggggtggctgaagctgactttgactgaaacaggatcaaagcagctggaggttaccgggtgaataatgtgccaccaggcataaagcagggatgcaagcagtgcaggtagtgagggtcacagaagacgctgtattactgtcataactgctagtatctgtgcacttgagaattttgcttatttcataaagcagtttcttcataaagcagtttccaagaagtccgtgtgtgtgtgtgtgtgtgtgtgtgtgtgtgtgtgtgtgtgtgtatgccaagtgtgcatgcacttgtgtgcaaaagtcctcactaacataccctttatctcttggaggtataatagggtaggtccagtatgtgggactcctagataattatgttttttgtaaggtcgcttttacctattatctaagttaatcataaattacctttccaaagcaaagaaatggtgggtctgccaggcgtggtagtttgcacctttaatcccagcactcgggaggcagaggcaggcggatttctgagttcaaggccagcctggtctacaaagtgagttccaggacagccagggctacacagagaaaccctgtctcgaaaaaaccaaaaacaacaacccaacccaaccaaaccaaaccaaacaaaacaaaacaacaaaaaagaaacggtgggtctaagttgaaaatgaagtgatcttattgaatgatacagcccaccaacagttaggcagtagaggaagagaagatactcagggcctcccacaaaggggtgctatcttgatgcagacatttgacagcaggattcaaagtaagtgttatttgtagcttttcctaaatatatcgttataactttggtaactgaaagcatttctgaacttttctttattgtagaagctgaaaagaacttataagtgtgcagtttcgctgtctttactcttaagactgacgattattttagatgtcataattttggctcatcttccttagataaatggccaagctctatctctgatggtagagatgtgaggcttgatggcttgctgaggaaacatgaaaactgcacagtgagccagtgctctctttcccagctgagggggaccgacagccacgcagcacagagaggctggcccaagcgttgtatggaaaggaaaaatttaaaagtgctagaactatattcacacatacgttttggtcaccaaacatatcttaacagattccctgataaaatctaatcagaatcggcctgttctatgaacagttagtatctattttaatatttaaagagtcacactctgaagtgagggtgatagacattttaaacactcaaccatacaagtgtagtggtctctcaaacactcaaaactaaatctgtatttaaagtcttaaagatcacactattttcacctaataacagcatcgaccccgtggacagactgtacaacaaagctcactcctaagtgcatatgagcgtatcatcaccagggcttgaaaatgtacagaacgcaaaccatgaagaccacacagttcagctggcattggtaactactcttttacaccacattgtacaatgcacgaggtaactattgctcacattatgaagggaggctgcttcatttctatttttttcccaaagaactcagatttgtcgtgtgcgcacaatgaaggaagctccggtaacactgcagtgacagatgttgtaaatacacattactaccagatagaaatatacaatgctctccatagtcatgttccacaatgactaggtaagtaatggaagtcttggggtgcagaccattatagcaacccgtcgagattcttgtggacagtctggtttccctttccatcatcagaatccccttgaggtgtgtactgaacttggtattcctgaaggattttaaaaacatcatggtgtccaaagtgtagtgcttcatccatgggggtattattccacctgcagcacagcagacagggtcgttagtcaaggaactgctgctcggagacagtgctccggcacccccaggttttccatccaagctccacggctgttgacgttcatctatactttagcagtattacaagtgagactcccccaccccccaaaacacacaaaaaagttcttagagttcagacactggtgtgagagagacatcttgataatgaggataatggaatgcgttctatgaaaaattctgtttcctcatccaaatgctaaaagaggggcctttggaagccaagtctactgttgaccggtatttacaaaccaggtagtgtaacatcatcctaacctgtcacaggaagcttatgtccctgcgcattcaaaagttacagcaagccagaagtcttccaggtttccaataacttcatggcattaaatgcatgttagatgaacaagctgcgcccagaggaagtgaccctttcatcacagcaagtaagggaaggaagccgtgggcgtacccggcccactgcccgatcagaactcctagtctgcactggtgtgctccagcagtgagcagctgaggtctgtggaaaggcgcgggcggcattgtaaaagccccagaaaaggccaggcttgctgctcagccgctgggtcctcacagcccgtggagcctgtccactcagcagcccctgctggctcctctcctctccattggctcctggccccagttcccatcccaccgccctgcttttgcttctttccatcatcctgcgtctgcccagaacctttcacctaattaataggtcacaatgcgaagccaaacagaaagtgcttaatttcacatctgaaaggttcctggtagcctgctcttcattttaaaaatcaggtaagtcagaaactttacacatctctgtttctcaagaggcggctactgattttccctgccgtgtgtgtgtggcttttcattagggagcctaacatgatcaagtatttgtgtcagcttctggggaaactgccaggtcatctttacatttcttccatgacacaatgaaaattccacctgcaacgaatacagtgctttgctcctgctgttctgtaatatgggccatactgatcctgcatgatgggggaaacacgtagcttcgtgtctggactgccgcatagcttactgcagtcattccttttaataaccagaggaatggagagagagccaacatgttaccacctcacaaaattgctaacaaatttcagttataacaaaacttgtcattttttggtaaactgaaccaaaaagatttaggtccctaaaacaaaggctgagtaatccaaccaactagctgaagatagtcaacttgctctaaactttgcagctcttgggcttcattccaaactcaaacagcactagggatgggtccatggcattcttctgagctcctatccttactgctaaactgatggtgcagccattccaaagatgagctgcccaaggagtgagcgcagtgtggcatgcttagcactgccctctgccttaggctgggaaggaaggggccgcatgggccaggagggaagctcagaggagcagagtgttgtaggtggtccttcccactgcaggcagaacgcaccccccatttagtgccttcaaatctcccctccaatggactatctaaaatccaactcccagaaagccttctgaaactaactgcaacaaatgcgaagcaaccccagcacaccaaagtcagtttccttacaaactcggccacacttgtgtgttgtctgtgtagttaaaacgttccctgcgaacagagttcccgttttctctttttaagtacgaaggactgtcttcttcatatttgctgattggtcgtcaaacctgaaagtcctgaacaagacaccactctctgatggagttggatgtcacacagccagcaaaatccgcatgttgcctttgtaagacaccatggacataagcaacactccagtctgtgtattcaaattgtgacttagcaactaggggaagtggtaatgtagacactcacctgtccttggggaaagggtttactttgcaagcttccagcaaaaacttgacaacttcaacatgacctatattcccccaaacacaaaaaaatgtattttagtcttgagtgggatttgggtctggaaaagctctaagtggctcatgcgttaccctctgctgctgcgacatggagggctgttctggagtcataatcccgctgctccatgtccatggctgacagagcaaacctggaaaggcataaatcgctcgctcgtcactgcgttagattagcttaggtcaatggtagcatttgctccatctgtccaatgtaggcctctcatttaggttccctgtgctaccagattggggtaaatgccgtgtgaccactcttccttagctgtgctactgtggaggaagataaacagctgtctctcccagaactaaatttcatcacattattatttaaacgattcttaaaatagtggtgcagctcgattaaaagggcaaaaggcctacagtaaaactacatgtttcagtgtaccttcaaacaccaaaagtcagtgtctccaccctgcccgcataccttcggagggcagacacatctccagtgtatgcggcaaacagaaggtttatcaccgacttcacctatggacaaagacaagacagatatttgtgggagaaagcaaatgaggccattgccgtatagttttcatgtgctttgaagacttcagctggattgatgagatgttatcctaggcacacatctaaaaaacacacacgcccttagccaagacggatagaaaataaagtataagatacatgtgggaagaggctagaatattaacacagagtggaagctcataacactgacatcggcagtgaagaaaactagaagttctctaaaaacctcatatagtatgtctcactacattaaacaagtctacatgggtaaaagtcatatcacgtactaaaactaactcaggctacatacatgtctcatccctgccatctccaccattgtctccactgacttccttgtgcatcaacgtaaacttaagagcaaagctgctcttcattggggagtcttgactattgcccgggtgactggtgtaaactagggcatgctcagaccatatgacactgcagaaagggtaggttctggctatagtgtgcgccaaggcataaggtgaatctgcttttgatagttacctactcattttatagttaagtggaagaggctagttattctaagatactcagttttgacttttcatttggactacccatccctgtttatcgaaagcccagacatcatagactgccaagtttgcaccctgcagtgtcagcattctctctgatgggactctgtggtagacacattagtctaactggggcacagtttatcccagttctgtgactgcttccctctagacctaaaacctgacgttgccttcacgttatggctccccttcccacagcctgcgaactttaaggctgagtgctgaacactgctgaatatctctgacttagcattgaaaatgtatcctacaaactagcccaaaagattctccatgaaaaggaccctatgattagatatgttcttaaaatattaaattcccctattggagagtcatgggcatatgggaatttgaggactgatatcacctcagaagtccatgcctgatacaaaaaccccccatcatccccactgcctgctcctgccagcctctgagcctgcgctgctccagagctatgggaggagggtgggcttttgctgtgaagactctaaaagcatgacaaatcatttctagttgtttgacttcaggcaagggtgataaaaacaggttcagttagtctcaatgactgacagctgggctgggttatgagccaccactcatgaatgcagtgcctgatgtgtccagaagagggcactggattcactggagcgggggtaggggtgggggatggcaggcgggaggataagagagcctgggtgagtcgcccacaagggtgctgtgaactgggtcttctgcaagagcaggaagtgctctgcatggagcagccatctctccagcccaggaccaggtgtcattcccttctcctctgtagtcaacatgagactgatcccctgttagaaatcaccaacttctcactgtcggtcaccgtttctctttcccatttgttccctttatactttctgcaggcaaagcccaggttaaagaactccctgctgaccctggttaaaactacacatcatataaacccatcttcacaactccctatactcttaagcaaaataccatctcctcctcttcctttgctcctgcctcagaccagccttattcccgggtccttccttcagcacttaggcaggcagtcttccagactgctgccttgctgctagggtctttgcttctagcatcttctacattctcctgcttcacttctgtctgccataacacacagaaaaacccattatcttaccccgaagtttccccttttaggaggtactttctggctgtgccttttatttccccaagaatcacctgcacatcctaacggtactcggtactccgcaagctcctctgcctggcctctcatgactcctcccatgaaactgcagcaccctgaacaccttgtgttgaccgc

SEQ ID NO: 28 - DNA, 4461 bp, Mus musculus
ggaagccaacactggaccgttctccaggtggcaggctctagagggttccatgagcttctctttcctggatcaggttgtgggagcagctgcaccatttcttggcacagggaagaagcaaacaagagcaaacagatgccagagaatgtggcttggttgacgtcagtggaggtccgaagagggcactagactcctggaactggagttgggaaccattacgcaggcactgcaaatccaagccctgtcctctgcaagagcaagttctctgtagctgctgagttaaaggcaacgccgagtctgtcaaagctccctggagacctccgggaccgcgcccctcagacccacttgggacactgctgagcggcgcagagagatttgcccagactcgagctcctgcgtgcagtgagtgagtgagagccagtcgtttcagctctgctccataccctgagccggcgccacgccgccgcgcatgcaactggcatataacttgctgtgtgtggtgattgcttgtgttgaatcccgaacctgcacccggagacagcccagaggatgtcacagtggttcgagcttcagcagctggactccaagttcctggagcaggtccaccagctgtacgatgacagtttccccatggaaatcagacagtacctggcccagtggctggaaaagcaagactgggagcacgctgcctatgatgtctcgtttgcgaccatccgcttccatgacctcctctcacagctggacgaccagtacagccgcttttctctggagaataatttcttgttgcagcacaacatacggaaaagcaagcgtaatctccaggataacttccaagaagatcccgtacagatgtccatgatcatctacaactgtctgaaggaagaaaggaagattttggaaaatgcccaaagatttaatcaggcccaggagggaaatattcagaacactgtgatgttagataaacagaaggagctggacagtaaagtcagaaatgtgaaggatcaagtcatgtgcatagagcaggaaatcaagaccctagaagaattacaagatgaatatgactttaaatgcaaaacctctcagaacagagaaggtgaagccaatggtgtggcgaagagcgaccaaaaacaggaacagctgctgctccacaagatgtttttaatgcttgacaataagagaaaggagataattcacaaaatcagagagttgctgaattccatcgagctcactcagaacactctgattaatgacgagctcgtggagtggaagcgaaggcagcagagcgcctgcatcgggggaccgcccaacgcctgcctggatcagctgcaaagctggttcaccattgttgcagagaccctgcagcagatccgtcagcagcttaaaaagctggaggagttggaacagaaattcacctatgagcccgaccctattacaaaaaacaagcaggtgttgtcagatcgaaccttcctcctcttccagcagctcattcagagctccttcgtggtagaacgacagccgtgcatgcccactcacccgcagaggcccctggtcttgaagactggggtacagttcactgtcaagctgagactgttggtgaaattgcaagagctgaactataacttgaaagtgaaagtctcatttgacaaagatgtgaacgagaaaaacacagttaaaggatttcggaagttcaacatcttgggtacgcacacaaaagtgatgaacatggaagaatccaccaacggaagtctggcagctgagttccgacacctgcaactgaaggaacagaaaaacgctgggaacagaactaatgaggggcctctcattgtcaccgaagaacttcactctcttagctttgaaacccagttgtgccagccaggcttggtgattgacctggagaccacctctcttcctgtcgtggtgatctccaacgtcagccagctccccagtggctgggcgtctatcctgtggtacaacatgctggtgacagagcccaggaatctctccttcttcctgaaccccccgtgcgcgtggtggtcccagctctcagaggtgttgagttggcagttttcatcagtcaccaagagaggtctgaacgcagaccagctgagcatgctgggagagaagctgctgggccctaatgctggccctgatggtcttattccatggacaaggttttgtaaggaaaatattaatgataaaaatttctccttctggccttggattgacaccatcctagagctcattaagaagcacctgctgtgcctctggaatgatgggtgcattatgggcttcatcagcaaggagcgagaacgcgctctgctcaaggaccagcagccagggacgttcctgcttagattcagtgagagctcccgggaaggggccatcacattcacatgggtggaacggtcccagaacggaggtgaacctgacttccatgccgtggagccctacacgaaaaaagaactttcagctgttactttcccagatattattcgcaactacaaagtcatggctgccgagaacataccagagaatcccctgaagtatctgtaccccaatattgacaaagaccacgcctttgggaagtattattccagaccaaaggaagcaccagaaccgatggagcttgacgaccctaagcgaactggatacatcaagactgagttgatttctgtgtctgaagtccacccttctagacttcagaccacagacaacctgcttcccatgtctccagaggagtttgatgagatgtcccggatagtgggccccgaatttgacagtatgatgagcacagtataaacacgaatttctctctggcgacatttttttcccatctgtgattccttcctgctactgttccttcatatgcagtatttctagggaaatgcaagaaagaaagagcatcacatttgctgagcactgctggtagaaagtggatatttctctaattagaaacctgttactctgaaggacttcatgcatcttactgaaggtgaaatggaaagtcacttaacacaaaatggattttgtaaacaaagaccaagagatccacccaagcaccaggactagagtgcgagtatttggggcaaggtgaggagaacggtcactttagtaatggtctgtaatcagtgcccaagtgctgcacatcactggaaagagacatacttatgggggaggggccttcttgatggaggaatgtttctgtcccgggagacattggcacttcccctctcctggatggccggaagtcttccactgttttacatatggcacagttcaaagtcaactttagatccaatgctctatcaaactatagtgggcatccttcatgtgagtgggaagaaaacaaccgtgctccttactgcagcttctgccaaggcatggttgctctcctcagggactagctttgttggtggcaatggctacacaaaactaaacaccaacagaagtaagaccattttcatgagtactccatcaagttaaagggtttttgttgtctttttggtcatggattgaataaaattgtctttgcacatccattaagggggccagctttcttaaagcaatttttctttttttttaactaaaattagatataggtgaactcatgttttttagtgggctgaacttatcggttttagctggttgtcttaattagccataaacttggagaaagcagtgacttcttgaatccttagccaaatatgagtatcagataattttattatttttttttcgagacagggtttctctgtgtagccctggctattctggaactcactctgtagatcaggctggcctggaactcagaaatccgcctgtctctgcctcccgagtgctgggattaaaggtgtgcaccaccaatgcctggtgagataactttaaagaactccctataaatgcatgagaaccactgttactgatgaatgtggttttttgacaactacattcacaaatggcctgtcttgtgttttgtcaccgttttgagggatgatgttttgtggcacgtgtgtgatcacagcctgatggttctggtcgtgggttggttcttctgggccagctttcacagactgctgcgcagctgcacctacagtgctgccccataatactgtttcactttggtgaagatcagcccaccttacaccccgagtgcaggtgtgaaccacggtaagtgtgcacagtccttagggaaaacagggacgcagaggcctgcctcctctcttttccatgccaaaatgaaatgaccaagaaacaaaacatttaaaaagttgtttctaaatgctgagacctaaccattgcttatatactgttgtctgttgaaacagtttgttacaatttcattctgttgaactaggtgagactttaagaaatgttgaaattatgttaatttcctattattatttaatataaagatatttaaaatgtctagtgttatgagttggtttaatatatatctcatgtatg

SEQ ID NO: 29 - protein, 743 aa, Mus musculus
MSQWFELQQLDSKFLEQVHQLYDDSFPMEIRQYLAQWLEKQDWEHAAYDVSFATIRFHDLLSQLDDQYSRFSLENNFLLQHNIRKSKRNLQDNFQEDPVQMSMIIYNCLKEERKINAQRFNQAQEGNIQNTVMLDKQKELDSKVRNVKDQVMCIEQEIKTLEELQDEYDFKCKTSQNREGEANGVAKSDQKQEQLLLHKMFLMLDNKRKEIIHKIRELLNSIELTQNTLINDELVEWKRRQQSACIGGPPNACLDQLQSWFTIVAETLQQIRQQLKKLEELEQKFTYEPDPITKNKQVLSDRTFLLFQQLIQSSFVVERQPCMPTHPQRPLVLKTGVQFTVKLRLLVKLQELNYNLKVKVSFDKDVNEKNTVKGFRKFNILGTHTKVMNMEESTNGSLAAEFRHLQLKEQKNAGNRTNEGPLIVTEELHSLSFETQLCQPGLVIDLETTSLPVVVISNVSQLPSGWASILWYNMLVTEPRNLSFFLNPPCAWWSQLSEVLSWQFSSVTKRQADQLSMLGEKLLGPNAGPDGLIPWTRFCKENINDKNFSFWPWIDTILIKKHLLCLWNDGCIMGFISKERERALLKDQQPGTFLLRFSESSREGAITFTWVERSQNGGEPDFHAVEPYTKKELSAVTFPDIIRNYKVMAAENIPENPLKYLYPNIDKDHAFGKYYSRPKEAPEPMELDDPKRTGYIKTELISVSEVHPSRLQTTDNLLPMSPEEFDEMSRIVGPEFDSMMSTV

SEQ ID NO: 30 - DNA, 65212 bp, Homo sapiens
tgtaattccaacactttaggaggctgaggtgggaggatcacttgagcctcagggtttgagaccagtccaggaaacacaaggagaccccatctctactcagaatatatatatatatatatatatagaatttttttttaaattagccaggtgtggtggtatgcacctatggtcccagctactctggaggctgaggtgagaggatcgcccaggaggtcttggctgcagccaaccgtgctcatgccacttcactccagcctgggtgacagagtgagactctgtctcaaaaaaaagaaaaaaaaagaatcatttatattactatgtcacaaagttggttttaatatatcacaaagttggcccgatatcagtatttcaatgtaattggttttcttttgaatcttatgcatcttatcttattcaactaaaaacattattttctgaaaaacttacaggtttcatcagactgccaaagaggtccatgtcacaaaaactagttaagaatcccagctttggataaagaccacaattcgcaacagatctttccaaagtcacgtattatttagtcccctcttagtcttcaactcatctctcttcactcctccccaacagcttcttatccaccaaaacatctgcacacaagactgactgaactactttcagtttctttgatggcccatgttctctctgtttcccctgccacatcctctcaattctccaaccccatcccatatatccctgcacctggataatgtttacgcattcttcaggctctggaaagccttcctgccaaacacacacacatacatacacacacacacacacacgcatgtgtgcgcatggctcaggtcatgccacgcttcctccatagcatcctctacatccccggcacagtgcttatctcctttggtgtaaatgatatcatctattttcctcaatagactctaagcaagctctgtatgtacatggaccaagacagccctgctcacagttatatccctggaatctagtacaatctggccctgaataaatatttattaatgatttggtgtttggacacatcaagaacagtcattagttccttcctttcctttgctccttgggctgcctgcaaaactaagctgaaattctcttcctaacagctccaaactctaaaatcatgaaacagcccccaatgttatgcttcatcctgattaaccaaaacacacttgcttttgatcacacagagaggacttcctccctacctcaccctgaacttccaatagacattgtctagaattacagtttataagctcactctaacttccctttgatgctaggtattatctcatgcatgcctaacatcctagacatctacctactcatagatgaaccaagtgttcctgaaatttcccctaaactctccattacactcaagggcattactacttctgcccctagtaaaagtcctccacaaagaatggcatgaacccgggaggcagagcttgcagtgagccgagatggcaccactgcactacagtctgggcgacagagcaagactccgactcaaaaaaaaaaaaagtcctccacaacactcttatgtcaggcttgacagtcatcttcttagacatctcacagactgatagactgccgcaaacggaaagaactctgccgtccagagagggcagagagaggggagaggttggaaggggtgtgaaggagtagagctctcattaaaagtcctttagggaagttttttgcgctatgcatgctcattattctcttcccccctcaattgtggctcgataggtcttagagccagtgctgagatctgaatggctgaattaacctgtgattcctgatctcagtgttggtcagtgacgttcatttattcattcaaaaaatatttttgaaatatttgaaaatgcctgtatcaggcattgctttgcttaaccagggtttctgaaccacaagacacagaaagtgatttgcttgacgattttctcagttctcccagggatggcatacagtgacattctagatatacaggagagcagggaattcattacacacatagataccctgggggattagactgaattgtctcatggaatactggatggaaaaggctgttaacacagaacaaactccctcctgttgtgaacttacacgctggcgaggagagatgaaaacagacaaataataaacagggataggtttaacaagtgttatgaggattgcaagtgtgatacagtcactggaagaagcaatcaatgagggtgtctttgaggagatgatgactgaactgagacctagagaatgggaaggaggcagtccatgaacacagtcaggaaaacagcatcccaaaagaccagtgtatgtatgcacagggctcaggcaggtaaaaacttggggtatctgaggaacagaaagaggctaaggggattgaggggagcctagtgaagtatggggtgagataagatgagtaagaggggtaggtgagcccaaattggcgggccctggattcttattgcaaattgaagccagcagaggcttttaaacaggtgagtggtgttataaaatttgtttcttcatttaagtgaacatcgaacaaggttgctatacaagaaatgcccccaaattccccacctaggtctggcttccacagggcaggcactcagaagggctccacgcttggcttcatgctctcctgttgccttcttgaaattcttcattaattttgagtaagggaccccacattttcattttgcaacgggccctccctgcaaattacatagctggtcctgtgttgttctaacaggggaaaataaacgtctgtttgcatagtaggactctgtaccttagggtcttgtttgtgtgcagccattttggggctggtcgtcactctcacaagaggctggaggttggggcccaatgaggtaggtaggccctttcacacactggaggttctaggtgggtgccgagttcaccctaagaaggtagagccccttaagagtaggcgagcagagcccaaagaaactcagtctcgtgcctcctagaaccattgagtaagtcacagacattacacaaaactcttgtttcctcagccagccgaactttcgaaatcattgtccagtgactaagcattctccattatacttctcccacgttccttctggtataatcaccacaactgagaaggcatgggggcgagaagaccccagaagaaagaggcaagccccttgcagaccgagcctaaggacgcctatagaaactgccagaccccaacctctggttcaagggcagctacccaggctggctgagggtcacagcttaccagacaggacaagatctgagtcagtgcaagtgcaaactgtgtagatagcgaagtgaagcgggtaaaagagaccttttcaggacaaggaaagaaacggtggaagtgcaagggtaaggtttccagcaccttaggtgcagaaatcaggacacgtttccctccctccctctaaggtgaaacggcagccacccgcgcctccgccttccgtcgtgtgcagagctaacactcgcgcgtgcgggccgcgtggaccggcctctctgggaccccgtcccgcaagccgatctgcagccccagggcgagcgtgcgagcagtgcgcccgccgccagggagaaaccgttgggaggaagcgggctgcgggaaagccccgctgcgcctgcgtgctgcgcctgcgtactgctcccgcaggctctaactttcgcttttcggtttcctctcaatcccagtccttctcgctcccgggcagtttccccgaaagcacgtggggcggctcttccgagcactcgcgtccctcccgccgcgcgcgccgggccagctgtttccgaagcggttcaaactgcaccgcgcaaagccaggggcgtgggcgggcccgggctgctctacctgcgctcggaaagctagggctccaaagcgttcctgagcggtttttgaccgcgaatgtgatagtgctcatggtaaacactgaaaataaattacatagacatatcttactacccagacacattaacattttagagtatttttccttctccctctctgtttccatttatttacatttctatatattattacaataataggataatactgtctatgttttctttccttcattttcatttaattttatacgtggatattttccaatgtgaaattaaatagtctttgagagcctaactttgatattctactatatgaattgtgctttaactgacagttggaaaattcagtttctgatttttcactgttactaatgaagctgctatgaacatcattctgcataaatctttcatctatatctgatcacttccttatagcagatttctgtaagttcaagaatattataaaaacttccaaaaaaagattgtgttccctacattataatcgtcaatataattctggtcgatgtgttatttttccttcatgtaaagaacacagcttgcttgcatatggccattttcctaaaagtattcatagctttcctccatattgggatgaaatatgtcatgtacatattgcagttttgttcaaaccgtgatatgcatccctgcattttaaccagctgctatgtaggaggcctcttgtacttattaactggaaagaaaatacacacaccaagacaggtaagtgactgtacaaaacccaaatccagagaactacaagaaatgatagaaatcttttatttcaattctattatattacagatgaacaaatacagtttacactgatgaagtgacattcacagtataatagcaagccttacagaaaggaggagaggtgaagaggcattgactggaatttttagaaattcctactatcagatatttagcttataacattattagaaacattgggacaatatagctgaaatgcaaaatggtagctggaaggagagggaaagttaaaacatattactacagattggttcatcagatttgtagctgtcattttgaaatagatcaaggctgtaaagaaagcacagagccagtaagttttttttaataggaatgtggtaaggacacagataaagtattccttaaggatgagagactccaggggaaattcccatggttgggaagggcaatggacctgttccacttaattaagttccacttacttgttttagaattcagttgtaggatgttttgcttcatttcataaattctttatgagtgatctattgctgcataacagacgaaactattcccaaaactttggtaaaacatcaaccatttatcagtgcttgtgagtctagggtatgctggggagttcagttcacctgggtcaggcccccactttatcttgcctgggttctctcataaatctgaggtctaaacttgaacaactactgtgattcaactgtggtctgtgtggtctctcatgctcctgcaagctagccggacttctcatggaggctgggcagggttttgagagcggagtgtgtaaggcctcttgaggcctagactctaaatgtcacaatgtcacatctgctgcaaggtggggaaataacagagcagggaataatctggccattattgaaaatcattgatcaggagagccttcttagtttcagtttcatataatgaaaactacgtaactgatatctttttgccctggtttgcaggctgtactgtattctttatctagttattgtagatatttctgctataagttgctttaaaatgctttgtgcaacaaggcagataaactaagtaaatagaactggatgatttgggtataaaagaaacagtgagtgaagaataggaatgatactgtcttttctccaagcaaaatacagttcctccaaatgggaagtgtggagtagttcttaagtctttctactgtaacatcatgtgaacttatgagttactccggtgacttcacatcagttactcatcatataatagtattttctggattcctcactgtccttgactctcctttgtctgtacaccagttcaggggtggcaaataggaaatttcaccttacctgttgcttctgattgattgctggtgacagtgtaccctgtcatttgttgctcttttaaatccaatacaagtagttgcatttattgttttaaatgttgtccagttgatgggaggctgagggaggagaatcgtttgaacctaggagggggaggttgcagtgagccaagatcgcgccactgcactccagcctgggcgacagagtgacacttggtctcaaaaaaaaaaaaagttatccagttgaggccaggcacagtggttgacacctgtaatcccagcactttgggaggtcaaggcagacagatcacctgaggccgggagtgtgagaccagtctggccaacatggcaaaaccctgactctactaaaaatacaaaaaatttgacgggtttggtgatgtaggcctataatcccagctacttgggaggctaaagaatgagaatcgcttgaactcaggaggcggtggttgcagtgagccgagattgcaccaatgcactccagcctgggcgacagagcgagactctgtcatcaatacatacatacatacatatatacatacatacatagtatccagttggtttcagaccagcagcagtccgttagaatatttagattatttagaattttgatttagcgtgggaacctgaggcatgctgtctcctagcagagggaaggagcacacaagaacaagttgattacaaagaacacgcagtttcaggacagatggtatatacatcacaactgttcatattcctttatccagaacaagtcacatagccaaggtcagagttacagcacacagagaggtatactccacccttagtgaaccatggcaagcagtgggaagggacagaagagatttgaaaatagtacaatctacagacatagtgttagctgttttttctagttttgtgtcttttgcaaatctgacattgttgatatatagatatagctttccaagctgactgttataaggcaaccgtcacacatttgtatctgtcaaattctggatttctaggtttttgtttggctttggtttgattgctttttgaagcagtcaatatgttatacagtaagaaaatataaatagtttatccttcaggaatattgaatcttggaggcataaggattggacacttcaaaaaccataatattagagagtgtatagttattgtccaaataaatagagacacatatattatttggtcattcagagaccccagattaattgctacaggttgaggtggttctagaaagagaatatagtatttgggctgggctttaacaggtgaataagaatttggtaagtgaagagagtgaggagcaagacttgccattcagtatgtacaaaggggcagaaatcaggaaattaaaagcatggggggagtgctggagctagacgaggttagttgggaaatgcgacaatgatagaaaaggctggaaagaaggaaagaaacattttgtggaggatccagactagcagacaacatttgtgtttatcatatgtgcaaggagagttgttaaggcttttgagcagggaatgactatatcaatgcagtattttaaggaattgaatttggcaaatatagtgaaggagaaagagacaagaaaaaggtagtatacctagagattagcatagcattccaattctcaagtgatgaaggcttatggtaggtattgctgtggatgctaaaataaaggggggtagggaaggaagcatccacagatcttgatgatccaaattgggatttggagtgccaaataatcctatttgcagatgttaggattattccattccttcatcaatattgaagctaatatctgtgcaagttttatagtaccagaaaaaaaatttttaacatgtaatctacccttcctagagtcaacttttgatatagtttggctgtgtccccacccaaatctcatcttgaatgataactcccacaattcccacctgtcatgggaggaaactggtgggaggtgattaaattatgggggcgagactttcctgcgctgtttttgtgatagtgaatgagtctcgaggatccgatcattttaaaaatgggagtttccctgcacaagctctttgcctgccgccatcaatgaaagatgtgacttgttcctccttgcctcccgccatgattgtgaggcctccccagccatgtggaactgtaagtccattaaacctctttattttgtaaattgcccagtctcaggtctttattagcagcgttaaaaatggattaatacagcttttttcagagaacagtaaaacattgtcttggttcttgggtgagtaagagcagaagggacacttttggtgccgtggcatctcttggcagagaagtctaatttcactgctaacttgctttgtgagggtgcatttgtgacaagaagaacaaatagatgtgcaaagaaaaaaaactcatacacacacatataggcatatccatgggaaattattcagatccttctcctaccccaaagtgcctaattattcaaggcttgactcaaatcccgtctacttgaaggaactaattgattttatgagcatatagtccaaaaagatttagtttgtctggcttcagcaatgcctacctggagaagtgacatttaagctgagatttttaaactaagatctaaaagatgagttagccagcgaagagttgggtgaagcagatgttggctcaaggggttttccaaactcagggtgagaagtccctgagtttggagagtgtggtttatttgaagaactaaatgctgaagtaagcaaagcagagtggcacattatggggttggacaaagagatcgggaaaccagggctttatagtatgtattaagaaactgaattttataagagcaaagaaaagccatggaaggattttcaggttggcaaatgacatgatctgcttttcaattaaaaaaaaaaacactcaaactcttgtatggagaatggattaaaagggagataagggctgaagtgaggcagccattcgggaatctactgcagaaggaggcagcagaagagatggagcagagtaaatgagacttgggaaatatttaggaggaagaatcaattaagatttgaggatcaggtgttgcgaggtgagggagaaggcaatgtcaactatgaatcctaggtatctgtcatgtgccatttctagaaaaagagcaggtttgaggagaaagatgtttggttctgaacatagtttgtagagctcactgcacatacaagtggagaggcaagtgggagttgtaggtgtgaagcccagaggagaggtgtggacgggataagcatttaagactcctccatctagaaggaaactgaagctgtgggtgaggtcatcacagcacagcgtttaggagaagcccaggtaaagaagctgacgaatgtctggaccctgacaaccttaacatataatggtttgatagtggaggtggaggcaatgtagaaagaatgccagaggcaggaaaaagcaaggaggatgtgttatcatcatgaccaaggaagaaacgtgtttcaagaacaaaggcgtcaactctgccccatgcttccgagctgtcaagtaaagtgagaaaaacagaaaagcgttccctgggtttagcaacacggaggtcagttgctaaagggagcttctagaatgacgacgtcgccaaatctgtcctctgcctggattctcggcgatgaaactactacagagacctccaagtttgggcttctgcaaacacagcacgtccttctgatcgttctctaagatatgtaaacagaacgccagttcccagcgtggcaacacgggactgggctgcagctcacccagccggcggcccccgccggaagccggcggaaataccccagcgcgtgggcggagcagcggcccgcagagggaggcggtggcgcccacggaacagccgcgtctaattggctgagcgcggagccgcccggtgattggtgggggcggaagggggccgggcgccagcgctgccttttctcctgccgggtagtttcgctttcctgcgcagagtctgcggaggggctcggctgcaccggggggatcgcgcctggcagaccccagaccgagcagaggcgacccagcgcgctcgggagaggctgcaccgccgcgcccccgcctagcccttccggatcctgcgcgcagagtgagtggccgtgaggttccgggtgccgggggtgggacgcgcagggacagagtcctcgggccgtgcagttggacgccgggcgaggacggcccgtctgtgctgacccgcgaatagtgatcccagaggaagaacgcgtcctgagtattccaagtgcgagcagtgccacctgttctcggagatggcactgctcagcacgattgtccttgccagtcgtgctctggcagtgaagaggacttgtgaaatataattttcctctagaaggcactgcaccttcccatttaccgtcactttctcccgtttccacccctttccatcagtcacgttttcttcttttcgcagaaagtttcatttgctgtatgccatcctcgagagctgtctaggttaacgttcgcactctgtgtatataacctcgacagtcttggcacctaacgtgctgtgcgtagctgctcctttggttgaatccccaggcccttgttggggcacaaggtggcaggtcagtaaatgttcatggaatcagatgaatgagtacatgacttcggaatcttaattatgtttctatgttcaaagatggaagggcttaatgtcttcctagagtttaaaagtgatgtttagtttttgcagaccccccaccccaaaataatatagtcttaaaaaaatttctggccggtactgaagagttctgtggtaggtatgcagaggtgtggttgattgtgctttgaatgttgtttgtatagataaggagttattttcatagaacagaaacaggacttgagcctccagcacagtccattgtgcaaccattgcttaatgaggatgctggactcacacttgtgagatcataatatggtttgctttttactttctaattccgtctgaaatatacataatttcaattcaacaaactgtttcgagcacatagtatatgcagggcactgtccaaggtccataagatgttaaaaagcaaaataccccactactctaccccctccccacccaccttcccccgccggggactctggaggcatcacagagctttacaaggaaaactggaaccgatgctctaatagaggtacagaattcagtgagacgcaagtcaaagaaagcttaattgtgagtaagtctcagacaactttatgaaagaaggggcttttgtacatagctttgaatgctataggatttagagacgcaaaaatttgtggagaggctgtttccaagggcgagtagctggagcaaagcagaaatgttgggcacagttgaaaaacagtaaatgatttggtgactgggttgctttgttgatggatgaagatggggtggggtggaaatctgcctaggaatggacagatcataggatttttgcacaggagattgatgtggtccaatctgtgggcagcagaggctggactgggaaggtagaatgttggagacaggaaggagcaggtcttgggatggagtggaaggaatcaaccctaaatctgagatttgagctcagtgactgggagatggccatgccactccctgagttggtaacaggttttgtgagtagatgagactgactccagatttgtgaacatgagcttatttattcattgttttttttttttagagacagagtctctctctgtctcccaggctggagtacagtggcgcgatctcagctcactgcaacctccgcctcctgggttcaagcaattcccctgcctcagcctcacgagtagttgggactacaggtgcacaccaccatgccctgctaatttttttttgtattttagtagagacaaggtttcaccatgttgcccaggctggtcttgaactccggagctcaggcaatccgcccaccttggcctccgaaagtgctgggattacaggcgtgagccacctggccagcccaaacatgagcttattaattcacctcttctgtgccaggtgctacatatgtactagctcaaccagccttaagaaccaactgtggcagggtgcggaagctcacgcctgtaatcccagcactttgggaggctgaggtggaaggattgcctgaggtcaggtgtttgagaccagcctcagaaacataacgagaggctgtctctacagaaaatttaaaaattagccaggcttcttggctcgtgtttattgtattagtctgttctcatgctgctataaagaactgcccgagactaggtaatttataaagtgaagaggtttaattgactcacagttctgcatggcagaaggcatctcttcacggggcagcaggagagagaatagatgcaagcaggggaaatgccagtggcttataaaaccatcagatgtcatgaggctcactcattatcacgagaacagcatgggggagactgcccccatgattcagttacctccactggtcccgcccttaacacatgggaattatattacaattcgaggtaagatttgggtgggggcatagagccaaaccatatcacttgcagtctgagctccttgggaggctgaggtgggaggattgctctagtccaggggttggaggctgcagtgaactgcgctccactgccactgcgctccaacctggatgacagagcaagttcctgtctactaaacacacacacacacaccttgttgataggggagtaagttacctgggttcgcttggctaataagaggcgttgcagctcccattgcctgacggtccagcatatctgctttaggtagatccttattagttaccaagcagggagggagacagccacagatttttccactcaggtaaaataaaactgaactgaaaaatcaaattgcttcagcaggagtgccaaggggctgggcttgggtccgtttctactggtatatatgatgataactagctttataggccagacatttcctcacactcctttggaaggacatttgtggagtaggcgtgacctcatgcctgcatacatgtgctcggctacaagtatgcatacacactcttccatgccctacttgaaaatccagactccttccccagaggtctggcaggacaagattcacttgtgtctgctctgcatattgccacctgtgtgctgatataaatcctaagttacatgatggtcatgggagactctccgttttcctaatgaattttaggacttgcttatatcaagtttttgttgtgattttgaatctttaggatcactatgtaaaaatggacttaacagttatccaaaaagctaagtgttactttatccttttaaattacatttaatgatgttttaatctttaaaaatcattacttctttatgccagatttattgtttgtagtaggcaaagaagaaaatatatctttttaaatgtgtataagaaaaataatgaattttaccatatgaatcataaatataaaacaagtttgaaaatatttgagttaaattacaaatgtactgtgatttgtaggagagcaattttgggagagtcttgtgatttgtcttaaagcaagtctaattaaaataatgtttttcatgtatttatttgataaaatcacaaactcattttaaaggcatatttattggatacctactatgtggttgacattgttctagggatacaccagtgcacagaatcctccaccaacatccatcccttcaagtggtgaaaacagacaataatgaaaataaaatatgtggtaggtcagatggtggtgtaagtactatgaagaaaaataaaccagggaaaagagagagcatgtttccagggtgggaggtggttgcagtttaaataaaagaggccagagaaggctgccctgatatgttgacaataagcaaagacatgaagatgtgtttcgtggaggagaaaaaaagttcatccccaaactcaattaaaaacaggctttagactataaatgccatttaaataaaatattcctgggacaaactatgttttggattaagcaagatatttaagagtacaacctgatgctaggaaggctttctttggagctatggtttccatatacatagaaagaatgtatattctttttccctataggatgtctcagtggtacgaacttcagcagcttgactcaaaattcctggagcaggttcaccagctttatgatgacagttttcccatggaaatcagacagtacctggcacagtggttagaaaagcaagactggtaaggaaaattcactagacagaagaagaagtttacaccttaaaagtactggttgattaagtgacttggggccatgtttactggaagatgaattccatcaatggccactggaattatttgttgtagaaaagtttgttgatttaaaaaatgactcaacaaagttgagccaaaaagtgtctcaacaaagttaagtatattagtcattaagcacttttatacagttttgccaaatttaatttatgatagatattcctaaatgctttggacaagttacggaatactgacaccgattattttccaacttaggatccagactatagaaagaagtaatttaaaagaaataaagccaaattaatggttaaacattgattagaaatatgaagaaggtagtaaaattaaggggattttttttaactgataggtgttctactttaaaatttattatttgctaatttaaaaacgtcctgaaagtatttgacatagaaagtgaagggtcccctgttgacttttcccccttcagagatagtcaccatgaacactgtcatgcacaatctcttagagtttagaattttttgtgctaattgcacataagagaaataccacataaactgctgctaaaagcaatgtcagtttcaaaagaagaaaataaacctaagaaaatacttaaattatttttaataatttcaataaggaaaccaacatttgttttgtctgttttacatagacatttagttctagaatgaaatgtgtaaatgttaaatctcctagggagcacgctgccaatgatgtttcatttgccaccatccgttttcatgacctcctgtcacagctggatgatcaatatagtcgcttttctttggagaataacttcttgctacagcataacataaggaaaagcaagcgtaatcttcaggtatgacctggtttttgtattttagttgaaatgttctcatgtttatggaaggcagttttcttcattcagcaaatacaattgagcacacacttattggtatttagagaagtaatagagactaactccatttatgttatctacagcatcagtaaatatagcataagtaaaataagataccaatttattttataaacacagaaggaatttttagggttaaatgtatcacctcttaggtatcagtaatcctgagaaaaatgtgatgctataattttgttttactaaaaattgtcaatatttaaaccaaagaaaaggggctacattttaagagcaatgatctatagtaatacattaaagctccagggaacattagtggttaggttcaggtccttgctatgcaaatgaggaataaaacaggaaaggtttgactttcacctaaggaagtcaggtgacttcaggaactagactccaccttgccttgcttctggtggagttggcctctcctggaagagaaagtcaaagaaagatccagacatgagagaacatgctatagagttttaggggttcttcagatgtactcccagcatgcccttggggtggctatcatatttatgttgtgtaataacagaacttttctgttttaatggaggtgaaagctatcattttcttctttcatacaatacaactgaacttttcagcttaggtaattggaagttgtttttttttcctttgtgaatgtatttatgattttatttacgagtggggaaatcaaattaactttacagaaatttgttctcatacagaccttgcatgaatgtacctgtataaagagccattattgctattggtagtgttttgcaaactagctttgacaatggcaacagaaaaccctagatgaatatctttggtctagttcaaagcttagaccaacagatgcattcattgaggaatgtcatgtatagtttttatatcatttgcattgtctcgggatcctaaccaaagataattggccttaagaaatatggaaagatattaaagtaaaaatattatgtgaaccatatgtgaaaatacttgtttttaaatcaaaaagtacgttaggtacctgcacttagaaagttaaagcaatttttgtcataattcgtgaaagaaatattttgattttaacaaacatagcttatatagaatttaatagatgagagatgaggtttcccggagaatataaacaaattcatatcaacttacaatacacaataaagtaaacattctgcattttaatttatttttgttctaaccactcaaatctaggataattttcaggaagacccaatccagatgtctatgatcatttacagctgtctgaaggaagaaaggaaaattctggaaaacgcccagagatttaatcaggtacttttttctcattgaacacataaactgtaataaaataaaaatgtattcattcatcaaatactattagggcccatgtcaaagcaatgatgaatatctctctaattttatagccccaagaagtgggagaatcagatttagagattttatagaaccaggctttaagaaagatcctaatctaatggaattaagttctaacgaggagagagaacatataaacaagatacttctgggtagcataaagtgctgagaagataacatgctgaattcatggagtggctgggagtggggttgttcctttagatcagggtcaggaaaggcctctgagttgctggcacaggaatggaagcaggcagatagagggttcttgcagctgtccaaggtagaggcagtggaagcttgcgctcagtagaatcagtggaggtaggaagaggtggacagattcaggttatgctttggatgtgataccaatatagaaggatccttatgttgaaggattagatgcaggagtgagagcagaaagtcaaggatggctctacagcagctactagaaccccttgaaaaatggtaatgctgtacacggagctgggaaggcaaggagggggcaggggcaggagttttgtaggactcaataggtttgtggagagaaaaggaggctgatgggaaaatcaagggctttgttttgagcaacatcaagatacctattaaatattcaaggcatcaaacagtaaatgagtcagagttgtactagtatcaagatttttgatcattgttttattaatcctaatacaaaccttcctagttgtcagggttcagcagagttttgaatttgctatggcatttagtattcctttcttgagcactggggtggtgacaacaagccaacaggcaggcagtgtgaagccaccatgttatggattgttctggaggagcccattgctatatggatgccagaggacacagtatgcatcctgtgtgcatttcaccaacaaataactaccgaagtgaactgtgtgacagtggagagggagggagtttaggtgtggtggaggatgccattctccacacactgcctgagcatttgtcccagtccttgtaatcctgtcacttccctaggcgtatagttcccatcttcttgtcacactgatagcatcttgctgaactgagcatgtaaagatacatattgcttattctaaactcaagctggctagctcatctggtacccagcctagggaacaaaggtgtatatcaacgctggaggagaagctggccaggttgtctcctctgaaagaggtgtgcctgtctctaacctggcatatacctgggagattttcagccggcagttttgattatatggggcttccatcctaaaagtagtatgcgtgggcctcctctgtatttctaatagacttgaaaggacagccaggagcaaagatgggcagaaggacaacctgtttcccccagctgcaagcatgtcatcctcacatttggccccttggcccagagatggcattggcagcagagtaggtgacccctgctctcccacatgaacctcatcccctggctttggatcttgaaggtttaccagcttttgagctccctccccattaaaaatgtaggtaatctggggattgttttgagcctctcagaggacacctgagtccgtgaacacctttgcaaagccttcttggggtgtgagggaagtttctgggtgtctggggatgtcagggaaagggaaaaggcacaataggtgcctcctttccaaagttatccagccaactattggctaggtaggtcagaaacatttcttcaccatttccccccttgttgaagtaactttattttattaatacagacatgcatcacttaatgacacagatacattctgagaaatgcaccactaggtgatcgcgtttttgtgcaaacattatagagtgcacttacacaaacccaggtggtataacctactatacacctacactatatggtaaagcctattgctcctaggctacaaacctgtacaatatgaagttgtactgaacgctatgggcaattgtaacacaatgttatttgtgtatctaaacatagaaaaggtacagtacagatagtgtgtaaaagataaaaggtggtacccccataaagctccattctaatcttatggggccactgtcatatacgcggtccatcgttgactgaaccattgttatgtggtacatgactgtgtatattctattcatgctaaagtatatgtgtatggaatggtgtgatgtctggtatttgcttcaaataatcccatttggggactagaagagtaaggagaatagggatgaaacaaggccatccatgaatgctaattgttgaaactgtgataggtacatggggattcaacagattcaacaagttaaaaacatgcaaaattccgagttagttcagatcatttagagaccacaaaattctatagacatgccgagatgggaaattattgttcccattgttttttaatataagagcttttagaaaatacatttaagagaatattatgctatacacactgtagtagactataaatgtttcgtgtgctgtcttacagcacactaagtttttttctttctttttttctttgtggtgaaaaagctagttgcatgtctagacaaaaatttaggtccatagggtctgaagggatggggagaatttctttcaggtgggagggaaagacatgaggtggattctaagcttcctttgctgttccatctttgtgttcttaaggactaatggttaccatatgctgagtgcttatcatgtttcaggccctgtgctaagcactttataaacattatttcatttgagtaaatactttcgaaactatcactgaagttaggtattcttatccccattttaaagatgagaaaactaaggtttagaggtcaggtacttcactcagagccacagagctaatgagaagtaggtttggaatttaaacccagtattgtccaactctaaaactagttcactggagaagtcacttttcagttttctaatctgtgggatgggatatgagggctttctggctggaacttctcacacccatggagtgcctattcccttacttggacaactgctcactctattggaaaggacccccttcctgagcagaagacttttctttgctctggggtctggagtaaccaagttcccatccaaacaaggtctctagaggtacagtagtgaaacgagaaagtaagagtcaatgacagccgaagtcccttccaacttcagtgtttgaaattcccgtggtttcagtactcctggtttcttagaaagttaaaaagttaaggactcactgtgaaagtggtatcagtactaaagtgtacaggagcagccaagcatctgcttagcagatgggggcagggtggagggaagcagggagggatgagtggaaggggtaagagagcaccaagggtttgagtgacttggagggactactgcccaagttggaagcaggagatttcttaggccctgccacagtcaccaggtttttccaccaagcatctcccagcaagtcagtagaaaggggatgtagaagctggggatgtagctgctgttttacagccattgtttatatccctgttctctaaaccgagccttggtcatttgggaggaggcctgggaagtcagaattctccagtggcctggtccctctctctaggtgtagtgtcccagctgttacaaagcccacaggacaccgtgcccacatcctgctggcttagaagttgtattagtctgttcttgcatggctataaagaaatacctgagactgggtaatttataagaaaagaggtttaattgacttatggttctgcaggctgtacaggaagcatggtgctggcatctgctcagtttctggggaggcctcaggaaacttacagtcatagcagcaggtgaaggggaagcacacatatcacatggccagagcaggaggaagcaggggagaggtgctccacacttaaccagatcttgtgagaactcgtgatcacaaggatagtaccaagaggatggtgctaaactattcatgagaaactgtccccgtgatccagtcaccttccaccaggccccacctccaacaatggggattacaattcatgagatttgggtggggacacagatccaaaccatgtcagaattagacaacagcaaagatttccctgcacaggcagaaagctgtatggaactcctcaaagtgacaacttattccaaccgcccagagaaaccccttttgtcactgagtgatatgtggcaccttggacttacagaggataccagtaacattcatgtatttctaatacacactttacagctgatacaattcacatgctttgaacttctgctgttggagaatatgtaacatgaaggaaaacttcctatgaagagagaataactttgatgacgtatgcctgataaagataaaacaaaaaattatggaccaattttacttatgagtatcaatataaaagtcctcaataagatattagggatcagaattaaatactacattaagaaaggacatgaccaaatatgatttattataggttacaagggtagtccatgactgggcaacctattaatgcaattcactaaattaatagctacaaggagaaaaaagcatttacttccttccacagaagctgaaaagatctaacagaattcaatactcattcctcataaaaacattgaataagataggaattgatgggtacctctttaacacaaaaaaatatatatatctccattctagagacagtatcttacctaactgggaaaactccagtaagtcagaaacacagcaaggatgctgtgtttccactgctatttagcatcgtattggtggtattggccaatgcaattagacaagagaaaaccattagaagcataagaattaaaaacaacatcataaagatgttagctctccctgagttaacttgtaattttaatgttattccaataaaaataccaacaagttgttttctggagctacacaaatttgttctgaaatttatgaaaaataaacatgcaagagtagcgaggcaacttctgaacaagtagagcaatgaaatgggactggccctactagacagactataaatcctctatagtcaaacatccttcaagggttcaggcttatgaataaaaaggccaatgggaaagaagagaaaaatctagaaggaaacccgtgtgcatatggaaattcatgtgataaagttggcagctcagagcactggggaaaataatggacttttcagtaaatgctgttaagacaaatggaaagctaactggaaaaaaagtgaaagcaaaaagtggacccatacttcactctgatcatgagaataaacaaatatatcagcgatctaaaagttaaaaagaaaaaaaggaaaccttgcaagtgctagggaaatgagtgaatgatgtaatgtcaatagggaaaggctttctaatataaggaaaattccagacatgaagaaaagatgatacaattgcacatataaaaacacccccgtagaatctgtgctgtatagggcactgtgtaagaaaggttgacaagcacagtttttgctgtgtgggggatttaactctaaaaaaataacatctttctagaatttaatctctatgagaacagggatcactggttaccactctaacacccgagcctagagcattgcctgacatttacttagtacctagtatgtgcagggtacatctggtgtatgaagcaagtagagaccctgtcacttctgagtgttctgattatcaaaaataggactgaatactcccaggcaagtctgggtttatattcattattgactttatagtagcagattttcattgatggccttaatggagtgatttcatatttcagtatacctctggatcacccggaattgtgttaaaatagggttttctgattgcctaatcatattagcccttgagattttccaacaagatcctaggtggtgagatgctgctggtctgaggaccacactttgaatcagaaagctttaagataaataaggactgagttaatgagagtaatcttgtgtatagtatctgagaaaccgtgaactaaattccagcgtggtaccatgcaactgtatgaattaatggaaactcccagaaatactgtttattttagacatgaattgagcctagtttttttgtaaccttgttaacagtttgccagcattttccagggccttgggaaaaatttcatattgacacataagcaggaagcctgtagtacatgtcagaagatctggaaggcaagtggggacttgactttggagtgtaaccagcaagtacacaccctgaagaaaacgatggctataatcatgcccttcccattacaggctcagtcggggaatattcagagcacagtgatgttagacaaacagaaagagcttgacagtaaagtcagaaatgtgaaggacaaggttatggtgagtattgagtaaacacatgcatttattctgaaactttctgtaggggaaaaaaggtttcaattgcttggggtgtaaacctcgtaactgagttcagtcttttaagtagttgggaagaaaaattttgcagaagtctcaagctataagtaaacaaattggcaaaatcaatgaccagatagactttttgaatggcctcttataactgccaaacattgagtttagctttttcttccctgaaagatcatgcagtaaatgttgactttgcccagtacccagtaaatgagatgttgctgctctaaatgggcctttatgtccacacctctcaaatcacagtgccccaggataaacatggcccatccttcccagtcatctgttttatcctaagacttggaagaggaacaaaaatacattttattgaaagaaatttggatacatttctgattaagacatccacagcaattttaggatacaacttccaagtcaatttatggaagcagagggctgctctggcgtcctcgatggtgcgcatttactcctctccactgttagggctggtgtggggagggtttgaggagttctttttcacagaggcctgtgtttgtggaaaaggccttccagcttaggggtttggtcctctgtggatctctgggtaatagcagtatggccttgacttacatgcttcagacagcatctttccaaactccacattctttggagcaacttcatcttgcggtctcctagggaaacatttcattaaagtagaaaccgagtgagcccagtccagaaatagccatggaaatccagagaagaatatgtggaaatgtgaccaaatcccaaacaaatgaggcttatttgtagaatgaacatacaatttattgtccagatggagatgcatttgagccgccaagagggcactgtttataattacagcaagtatgaaaccaggtctatcccggtaaagcagggatgtatggtcacttttcttacttggaaggaatgaggaaattttctgtgagctttttccccgcctgctgtgggcttcacagtggagttcttaaatcatatctcagaggtagtctcaaaaatgatgaggaagaatcaaaatttaggcgctggaaccaggttaaggacatacaaatcagtttgagaattattgtacgtttgcttttttaaaaatgttatgacatacttattaatgaaaccgaaattatttcatgtatatgattagaactgtccaagtcagatctctttttgggggagatggaattgttttcgtgtttctctgggttccatagaagcaatactctgttgcctaaagtctttggaagttgctgatcagtagaaaacatgtttacatctttgtttgtagtgtatagagcatgaaatcaagagcctggaagatttacaagatgaatatgacttcaaatgcaaaaccttgcagaacagaggtaagggttcacaactgaagtggtgcccgttggctgcaattttttctgttcacactagataacgaagatgattactcctttctatttgccgagtattttatgactctgaattcttccttgataacccaggccagggcttctcaacatccaatattattgacatttcgggctaatttgttgttggggctgtcctggcattgtagcgtgtttaacagcatccccgacttttacccaccagatgccagtagcactacccaggagccctcactagtgacaaccaaaactgtctccagagattgccaaaagtcccctaggggtcagtgacccctacttgataaccactggttatgtgttactcaccatatttattgcgcctagcccactgactgacacagagcgatagatatgtggagttcccctgccctaatatctcaggtttcttcaaacgttgcagggccacgtgtatacacagcagataagctcagtatttttctcatgttttaaagcagttttactgtattttcttactgttgcgtgtttttaatgagagtagcaacagaaaagatctcaagaatgtacattgtgtaggacacgtagggtactgctgttactctattcatcatctggggtataccatggttcataggcagagattatcagtatgatttgggtagaaagtataagagacagcaacttcaactaccacttcctactcatctacttctctttgaaagctacagctatgctttgtatacattttttatctgaattctgttcagataaaacattttattatttacatttatttttataataataataacattattattaatgttatttacatttatttaggtaattacctgacagtgtcttaagtggcagatactactatgtctgatttacatgggtcactgaaaacaagttttttttgttttttttttgttttttttgtttttttttggagacggagtctcgctctgtcgcccaggctagagtgcagtggcgagatctcggctcactccaagctccgcctcccgggttcatgctgttctcctgcctcagcctcccgagtagctgggactacaggcgtctgccactgcgcccggctaatttttgaaaacaagtattttgtttcagtgtgtctagttgttatacttaggactttttttcatgttcattaaagatcgaagaaagccaaactttgacctgtcactaggcagcatttgtgtcatatttatcctaaatttatatgaatcttggcttttgttggttttgtcttctttatatatttactggctgtctctcaatttatagaacacgagaccaatggtgtggcaaagagtgatcagaaacaagaacagctgttactcaagaagatgtatttaatgcttgacaataagagaaaggtagttatttactttccagaatagcatgccacttttgttatacactgtaaataatggactcaaagtttagaagagaggaaaaattatagccacctggcttagagccccagttgagaatgaaatgatatttgcttttcttttaaaaaatattttaaaattcagtgattaaaaatgaatttatttcactttgtttcttctattgcctttaggaagtagttcacaaaataatagagttgctgaatgtcactgaacttacccagaatgccctgattaatgatgaactagtggagtggaagcggagacagcagagcgcctgtattggggggccgcccaatgcttgcttggatcagctgcagaactggtaagattctccaaagcagaaaactggcagctgactggctaaccacataaacacataaatgtacctttgagctgtgttagttgaatggaccctgtcaaaacattagtatagagtttgacatagtccagcttctgcttaccctggaaacactcccttggaaagcacagtgttattcatgactctcgccacgttcagccacgtctgcttggtttggagcactcctgtaccatggggtgtcgtttgactgtacaaaacatcagtgacatggtcgttatagaacacatttaatgacttgactcttaatgtttccttaaaaacaagatagcttgaggcatttttctaggcttacagaatagttttttaggaaacattcagtcatccatccagtaatacttattaaatgcctactgtgtgccgggcactgtaggacctgggcacacaaggatgagtgattcttggcccttgccaacaaggagttctcagtgtggagggggggatgtagacatggtaataattcgtgtggtaaaagtatccaggtgctctagcaaaaggccatcagaattctgtggaggacaaaggaaagcatctccagggaaggtttcatagaggaagtggccttgtgctgactcaaaagtcactaggattactccacgtagatcaaggggaagtgctttccagcacagagcacagcgtgtgcaaaggcacacatgtgggagactgcaggggctgtattgggtggctggagagtggggtgtccagggagatgggaaggaaagtggacccggtgggagatgctggagcctgatggtgcaggttctcagcaccatgctgggaatgggggatgtacgcagctgtactgctgagccaaggcaggcttttttcttaagcaggagatgtatttctctgatctttgatttagaaagggcactctggccacagcctggaggataggatagagacagaaagaccagttggaatactattagcatattagtgtggtccaggtgaggggcaacaggagctgaacttggaatcacagagtgaacatgagggaaggtggcctgggacaattgctaagggtccaaggaccagagatctcacgaggttattttctatattgccagtttttaaaaaaatcacaattaatattcagccatttatttttgttctgtgaattgcctgtaggtaccccagatttcttgtgggttagagcagagcttctgagcccagtgcaccccatgtgccttgagggatacatacaaccctaaagcccttcaggtggccagggaggccctggggtgtttagagccccctagtggtcctcctagaccacaggagcctcttgtagggacacacatgccctctagttttcccactgtgctgtcattttctctgtgtgcaagcagagttggggacactggtttagcttctccgctggaactcagccagccgttatcctgccttctcctttcctgacgaagggctgctgtcccagggctttgaactggaatcgagcaaaatcagaaagtgaagtagatacttttcccagggaagaagacacttttaaaaggttttcttctgtcattactgcaagtgaataaaacagcgtttccccagcctgtgttgctgttagcagttgactgcaaggaaggaagactaagagcaatcactgggtttactcattggctttttatgtttagggtctagactgagcatactgccttctcctttcagttgagtgaaaccagaatcatcattccttcctctcttcctgtccccggccttgtctcccatctctgtctctcctcctgcccctctgccccacatctctgactggtcctgccgagacactgcttgctgatgccactctcttgacagaacctgcagtggctctttgctgcctcttgcatcacctggaagcacctgctttgctgttttccctgcctctggcctcctctttgccctgcaccagtcacagatcacctagaagccctgcctccacccatctctcctcacataggcctcagtggtgtgtagaagtttttgatgtaggctgtaatcattcagtgcatgttagttgtactcctcaaataacaaagcttctactgctggcacaagcctcgttccctttgtttttccctagagggcagagcatggcatcctaggtgacattttgtgttgcatataaccacttgttggtttccatgccatatggtttggccgtgtccccacccaaatctcaccttgaattgtaataatccccatgtgtcaagggcagggccaggtggagataattgaatcatgggggtggttcccccaatactgttctcatggtagtgagtaagtctcacgagatctgatggttttataagtgggaatttccctccacaaactctcttgcctgccaccatgtaagatgtgactttgctcctcatttgccttctgccatgattgtggggcctcctcagccatgtggaactatgtgtcaattaaacctctttcctttataaattctccagtctcgagtatgtctttattagcagcatgagaatggactaatataccatgattccctttaatccaggctgcttctggactgtttctcatagagacatctgtgtcttgtgtcttcccaggttcactatagttgcggagagtctgcagcaagttcggcagcagcttaaaaagttggaggaattggaacagaaatacacctacgaacatgaccctatcacaaaaaacaaacaagtgttatgggaccgcaccttcagtcttttccagcagctcattcagaggtaactcaagggacatttatttgtaccttctgtaatcggtctatacagaggaacattttaccgttaattcagatgatttacaagggtttaataggtgttttttatatatatatatatatatatatatatatatttttttttttttttgagatagagtctcacctatcacccaggctagagtgcagtggcgtgatcttggctcactgcaacctccacctcccaagttcaagcaatcctcctgcctcagcctcccaagtagctgggactacaggcgcatgccaccccacctggctaattttttttagtagagactgggtttcgccatgttggccaggctggtctccaactcctgaactcaggtgatctgccctcctcggcctcccaaagtgctgggattacaggcgtgagccactgtgcctggcctcaaattttttaatgacaatgactcttcctgaattatttggttataccagtggttcttcactcttgtggccagctaggctggaagctatagtaaccttccactcctccttcccctttggctgagtctccgccgtgaccctaacatgcctcacctcctcctctcccctcctcatgtctcaggctctcaaatcctcctttctggactcttccccagcctccccaccagtcctccttcccagtccttcctccctgtgaccagtgctgtcccagagcagagttccattctggttcctcatcacctgctgatccaagtgaatgcccagctgggcattcacggccccccttctgcagcctggacctagctgaacactccacgcttcacgtccacacacgcccctttctaggcaaacttgacctcttgctgattcctataggggccatgccgcatacttgcttttctgtggctctcctgaggatacttcctcttcctcagagccttcttttcatgtacctgctttcaaaattgtatcatcccgaaagcttcaccttgtatctcatcatttaatcttcccagatttcccaaacagatgttatctcccttcgtggcctacagtcacccttcgttcctttcctactctgccttttgttatatagttgttatgtatttctttatatttcttgaatatcataaagttctggaaggcagagacatgcctttgtcacccttttcccccagcaggacctagcgcagtgccttgtgaacagtaggctctctagacacacttagtagatagataaatgtcactgagtggaaaagaagggttcatattgcaagtttttttttttttaatgcaaacttgacatgataaaaatgtacttgattttgggtggaagcaatagctgagtggcagcggctgctgattgcgttccagggggcagagtcggggaagacatttactctcccagaacagcctatctcattcctttccttcagttacccgtggtgcagagagtcagggcagcagctgtagcagcaagggtggccgtggcagcggtggcagctacagtgacatgtccagcatgaatcccaaattgattatttattcaaattacttctgattggcgactctggggttggaaagtcttgcctccttcttaggtttgcagatgataacatatacagaaagctacatcagcacaattggtatggatttcaaaataagaactatagagttagacgggaaaacaatcaagcttcaaatatggaacacagcagaacaggaaaggtttcgaacagtcatctccagttattacagaggagccaatggcatcctagtggtgtatgatgtgacagatcaggagtccttcaataatattaaacagtgactgcagaaaatagatcattatcccagtgaaaacgtcaacaaattgttggtagggaacaagtgtgatctgaccacagagaaagtagtagactacacaacagccaaggaatttgctgattcccttggaattctgtttttggaaactagtgctaggaatgcaacaaggcccggcacggtggctcatgcctgtaatcccagcactttgggaggccgaggtgggtggatcacctgaggtcaggagttcgagagcagcctggccaacatgatgaaaccccatccctactaaaaatacaaaaattagccaggcatggtggcgggcgcctgtaatcccagctacttgggaggctgaggcaggagaattgctcgaacccaggtggcggaggttgcagtgagccgagattgcgccattgctctccagcctaggagacggagcaagactctgtctcaaaaaaaaaaaaaagaaagaatgcaatgaatgtagaactgtgttccatgatgatggcagctgagattaagaagctaatgggtcctggagcaacagctggtggtgctgagaagtccagtgttaaaattcagagcactctggtcaagcagtcaggtggaggttcctgctaaaatttgcctccatccttttctcacagtaataaatttgcaatctgaacccaagtgaagaaacaaaattgcctgaattgtactgtatgtagctgcactacaacagattcttaccatatccacagaggtcagagattgtaaatggtcaatactgactttttttttttattctcttgactcaagacagctaacttcattttcagaactgtcttaaacctttgtgtgctggtttataaaataatgtattttcctgatatcagactgttttctcgtggttggttagaatatattttgttttgatgtttatattggtgtgtttagatgtcaggtatagtcttctgaagatgaagttcagccattttatatcaaacagcacaagcagtgtctgtcactttccatgcgtaaagtttagtgagatgttatatgtaagatctgatttgctagttcttccttgtagagttataaatggaaagattacactgtctgattaatagcttcttcatactctgcatataatttgtggctgcagaatattgtaatttgttgcatactatgtaacaaaacaactgaagatatgtttaataaatatcgtacttattggaagtaatatttaaaaaaatgtacttggttccctatggctaatgttcaaacaagaagtcctgtatgttgggttttttaaaatttaaaaacattacttgtactttgagtgcacattttattcttaattctgacatgtaaatgaacataattaaatacggggtttttattttttattttggatttttgagacagggcctcactctgtcatccagactggagtgcagtggtgtgatcatggctcacttcagcctcaacctcctgggctcaagtgatcttcccacttcaaccctccagtagttgggactaattagccacgcctggctaattaaaaaaaaaaaaaaaatttgtaaagatacggtctcactatgttgcctgagctggtcttgaactcctgggctcaagcaatcttcacacctcagcctcttaaagtgctgggattacagacatgggccactgtgcctagccttcattgtatgtttgtttcaatgtaatagtttcacagatcattacagttattctgtttctgttaagtccctattaggttttgggatttctttactaattagaaaatatcactttgttcatccaacttgtcagaatctttcaaatgattttttagatcgtactctctaacccccttttttctttcaggaaaatcattgtgattgcctcaaccttaatggaaatgctaacttatctatcctttgctgggtatttgcagctcgtttgtggtggaaagacagccctgcatgccaacgcaccctcagaggccgctggtcttgaagacaggggtccagttcactgtgaagttgaggtaacaagggaaagatggcatcccatacatcacctgtcacgtagtttgtacccctagtttccttttataaaaactgttatatagggtgcttttgaggaaataatttttcagggggcactttaatatgaactcttactgagaatatctgagagtcttttattaatatattcatagtagaaatgtaactgatatacatatatgtacacactcctggtttttttccaatcataaatgtaatgcgtgttcacaggaaaacagaattccaaattgcagaaatgtgtgtaatagagagtaaaagttcctggctgcctcacccctcttgggcataggctcataacctgagccttatgaaccccagaagctgtatgaatgtggatttataacatgtacatttttctgatggatggatttatagctttcatcagtttctcaaagcagtccgtgatataaatatctgtggaccaccacagtaaatggcctagtgtctgtcctcccaggattttgtccatgtctacacaaatatatatttcatacggaaacacacacgcacaaacatgacataatgtttcctttttaaaaaattaggattccatgtctacacaaatatttcatatagagacacacacacacacaaatatgacatatttcttttttaaaaactcggagtaggctacatacattgttttgtagtctttctcctcgatactaattgtagaagtgtttccaggaatatgtggctttactttcttccattgaatggctgcattgctttaagcattcttcttatgatgagtagctagacgctgaagaactggactggccttcatagttggcccgggtcctttttctggggtgttgctgatttaagtctgtggttaaccctccctggctggtaggtacaatgtcacactgaagccctcgtggaattttagaactcagcagctggaagggacagtagaaatctgatcccatccacctgctccactgaacggagcagacagagccccggggtctccttctcaaagtctccagctcagtggagcagaggtacaccctctcacctgccctccatctttccacgctaccctggggtgactatagatgggacgctattttttctgcttatgggcaatagtttttattgtctcccaacaggacaaagattagatacaagttttaatagaaagtaatgtttgctattttacccatataaattggccaaaggtcgaaattgtgatgaaactgaatattggcaaggttatagaggtaaacagctaccctcattaacttttggtggcaatgtaaaatcagggcggcatcctgtcagaattagtgttacaatttttcctaagcggttccacagctaggaatttattcttacaaatacacttacaaaaatttaagtagatctacaaaactgtcagtttttttgttggtaataccctaaaactggagggggagtagtttatctaaacgttaatagggaattggcataataaataaattgtaacagataattttttttaagtaatggcttttatttttctttccagactgttggtgaaattgcaagagctgaattataatttgaaagtcaaagtcttatttgataagtaagatatctttaacattatataacatacatgtactattgaaatgttgattttgttactcaagcacagattcctccactaaataagcagatttctagctgtggaagggtctatactgggtggaagtttgcctccctagggccccagggctgaacccagagtcctgacaatgctgcgcatgagcagagacttctagtcagatccaccagggccatcacaaatgaccccagcagatttaaatcagcagctcccttggtggatgttgggagcttcccctggagctggtatcaacattcctgtgcctttttagactataaatgaacaaaagagtgagtgtctctttgtgcatatgagattgtaatcagcaagtctcaaagtggctggacttggcatgccaccccttccttctaggtcagccccaaaggagaggcccctgatccaacccgaggctgaacgtccaggctgccatgattctgtggtcatttgggggtttttttctggagcgaggtcagcagcatcttggggagactgtgtggagcctgtgggattcactcttgtctcttctgggcagtgggaacccaggaatgggcatctctcttgggggtccaggtggagcagcctcatcctattttgccctgagaccctagacctggactggcactaacttggccactctcattaaggaacaagatggctccccccccacccctcccatatttaatgtttttgttagcttgtgtcacatactgttttggcaagtttcaaaaatgatttatgatcattcagatcattttcctctggctttttgctttttcccactcctataagaatattcttcctcatagcatggtctgtgccttgtcttccctgccatcatctttggtatatcggttagcttttgcttcctaacaaaccactcccaaaacttagtggctaggccaggtgcagtggctcacacctgtaatcccagcactttgggaggccaaggcaggcagatcacatgaagccagagtttgagaccggcctggccaacatggcgaaaccccgtctctatgaaaaatacaaaaaattagccaggtgtggtggtgtgcaccggtaatcacagctacttgggaggccgaggcacgagaatcgcttgaacctgggaggcagaggttgcagtgagctgagatcatgccactgcactccagcctgggtgacagagtgagactctgtctaaaaacaaacaaacaaaaacttagtggctaaaaactcaaaaactcattatttctcatattctgtgagttgtaggttgtcctggtctgagctagtgtggttggagccaggtgctctagcaaggccttattacatgactgggactcagctgggataaccaggtccttcttcatgcacctcaaaaaggctagcctgggcttttcccatggtgacagtgttccaagtgaacaaggcctgtgagtgctagccttggaacatctatagcatcactcccttccatcctgttgctaaaagcaaatcaaggccagctgagattcgggggatggggaagtatatcctacttcctaaacggaggaagcacaagagttgtgttgccattgcagtttaccatcttctgcgtcagctcagctcctctcagctgcttcgggcccttgtgtcttttctgtcggttccagctctgacggtcttcttagctttgacaagtcagcttttatcatactatcccttttattttaaattctttttttttccaaacgggaaaataggtcccttccatagctaatggtgattgtcattcacaaaagcattgaacttctggttgagattggaaaggaaggggaactaatagatctgtgagtgagcccatgatttctagtctacatctaggacgctcacggatacattatttggccagaacatgacaaagtaatcactggatatagaagtgcaaggtctttcaaaattttaacctcagacttaaaacttaaacttgccactttccccagataactgactttcctggtactttcatgagagcattaaagatcatagagaataaaaatgagaattaaatggtcacattggcagtcctctgagctttgtgactactgggcagtgctgttggctggatccccagtgcttagtgcagggccttgcaccaagtagctgctcaataaacaataacgatagcttaaacatttattgagggtgtactggtgctggtgcttacatttattgagggtgtactggtgaggaattaactagtttattcctcatgatgtcctatatgttggcactgttagtatgttgtgcaaatgaacaatgtaaggcccagaccatttatttgccaaaggtcattcagtgatacttgccagacctagtatgggtagatggaagcagggagtgaatgaaaggctgcaaatccataggtgtagatttattttttattcatcattcacttacactcttatgctcttatactcttataattttgttaaagcttatttcaaattttaaatacgcatatgtgattatatatattttttttgcagagatgtgaatgagagaaatacagtaaaagggtacgtgacgtactttacgctatactgtgctatatttttatttatttaatagttggaagacttttcagcatttctttcctatattgtatagatttaggaagttcaacattttgggcacgcacacaaaagtgatgaacatggaggagtccaccaatggcagtctggcggctgaatttcggcacctggtagggacatcagtttcctctctatgttgtctctggtttcttaggacttttgacaatagagcagccctttttggcacattgccatgtggaggacgcccccctgctggggtttgtagactttgtggctggtgtcttcctgtcgccagtacttggggcattttggtttctcctccttatcccacgactgttcactctgttttctgggctgtatcacttgcagtaaaaatatttcctaagcctgtgtttacgtaaatgatttgcacttgctgcctgcatgatccccacggtcactcacctacgcttgcagttttctcaaaggttatggctcccgtgtcctgactgtgatccaagtgtggtcctgtacaccagggttcactcctcagcccccgtgttccccttcctggtggccctgcccacagcccctgcctccacgccagcctgactctaccaccttttctccagggcagtagggctcattccccaggcagtggagacccagcaggatgctctgtgtgggtgcaccatctttcctcctctgtgaacatgggggctgccagttgctgtgaggctctgtgggtgctgagtccgaagctttccctgggcccagaacctgcaggaggttaaaggcatcctttttcactagagaccactttgtgatccagcaagcctcgtagctaggaagctctacctaactcgaaagcttagcccaactcaggtgcctgagggtattcagagccgccctcagggccccagcctgctccctcgtcagctcagggattgacagctcagagattgacgtccacttgagggcaggtggacctggagtcactgggcccagcctggaggactctgctgagggaaaggggagggagaagctgtcccgagcctcagggcatgaaacagttaacgaaggtgcatggggaaacattcagggaaagtttgaacacaggagaggagcgggttgtgattccaagagatccctccagactggtgtccgcaccatgaggccactgaggaaacgtgcttctgctcatggaccctgaacgagggccaatttgtcccatgttctgcattctaaagataaagtcacgtctgtcattctttctagtcctaactttgttctcatttgtaaatgaagatagcaactttgaccattaccatggtgtttactaagatgattatttgttttatagcaattgaaagaacagaaaaatgctggcaccagaacgaatgaggtgagagtccctttatgttgtgaatgggcccaaatcaggcaggtctgtctagcaaggacaggtcagttggtggctggggacacctcacagaggagttcagacccatcagggaagagcagcaaaggagctgggtatttggtatatctgtgacaacagtaaaaacaccacatttgtgctttactattgtcaaacgattttgcacacaaattcattagacactcatggacaactcagtggagtagctgttgtgggcttttgtattcttcgcatcttacgggtgaagaaattgactcacagaagtttgcaggatttagctaagggtgcacagagttactgtcagagttggaacgagaggccactttgatgactgccttgctgtgtgccaagagggcttttcggccattgcatcccctaccaaaagcattgcctttgcatcagtttccttcctacagcgtgatccttaaggagttgggtttgtgatgcattcagaaatgaactatggacaaaggatgaaatatctggagttgttttggttgagaacactttcgtcatttatgcacacacagtgtgcagtccttccacaccaggaccagtggaggtcacatggagcagcgggacaaacacaggcccaggcagtgcaaagatgccttctagccctggtgtgcgcctgaactatgttttgacctccctgggtctagctgttgcacctctctagttctaagttgtgaggctcacatgaggtaatgcttatgaaggcactttgaaatctatccatttctaccgaaaccaagacaacttgtgacctgccaagttgatgtgagtcagcccttccggtaggcagtagacaatcacaagtatgcacttactcccagtcctctcaccttctccccacccatctgcattgagatgtgcagccacactgggcaggcagacagagctgagggtcgagaagccttaggtcacaaagccattagttgctctttccccattgacaatcattgctctgaatctataacccttgccgtaacttcagacacttatctttcagagcacactgagatactaagaatcattaaatctgggagagattgaatattgagtcttcagacttgccactgattgggcccaggatctctgtggcctgttgcaatgttaattgggcttttgaaagttttaggatctgtgaataattatattcttttcttctttccttttctcttccaagggtcctctcatcgttactgaagagcttcactcccttagttttgaaacccaattgtgccagcctggtttggtaattgacctcgaggtaagacttttatggtcccgagttggaaaacttcattatttttacttttaattgttacatgtatttttatttctcagtgtttgttctggaggtatttacctaattgttttaaaatgatctttttcagctaatactatcttaaccttaatttatggtccagaaagctagacaattgaattaaccttcaaattcaataacttaaaagttccagttgagatcgctgatgttaattttttttttttacattaagcattgggacttatttattttgctctgccctccccccacattttatgttttcattgtgacagttttcatcttctcatattgcatatcccttaattaattattgtagctattattatttttagggacttatttcttaactgaaagatacatcaaagacaagttaaactggacagaagaacagaacttaacacttctcattttcaagtattaaatatgtacaaatttacaaataatcccctgcttttagttgaggctaagcagttatctgaaggtgacatttctgtgattcagatgatttcaaggtctttgtcatcctttagacgacctctctgcccgttgtggtgatctccaacgtcagccagctcccgagcggttgggcctccatcctttggtacaacatgctggtggcggaacccagggtatggaaaacacatttgctttggtcccagggttaagcagagaccccacgctctcgctgctgcatctctgaaatagccccaatggccagttgttaagggagaagtgacaaagctcctgtggtatttctaaggcttttgagtaaatctgggaatatgaagcatggatatgtatttgaaatgagaattacgttttttctcccatgtgggtaagctagggcagtcagtgattccataccactttattgttattatttttaaaatgtatacatctactaaacaagcatgctccattcttagagtgtggatactcactgttaattaattacagtcatttataattattcaaagtacttatgttttttaaagtcaccaggaacacttaactagcaaataatgaattgttgctcctaagggaactacgaggctaggttccttcaagcctctggtcacaacatttttgtcaacccatcaatgcataacattgtttatgtgtgtttctgtttaaagacaccttatctaatacacttgttgaggcattaacattacacctatagctaggatcactgtaactcatgcctgagtgaagcttgcctcacacatgtattttctccataaggcacatcccagccttcccatgcttaggaacagtagaccacactgtggtactatgctcgggcaccattttaaacagggatcaccaacagcagtcacaaaatgcaaaaaacatggcgctaaataggcttcaaaaaggacacgtttttcttatgagaggtgaaacaggaagcgagtgtcattttgtttggcttcagttggaagcgtgttaagagactcgaattctttgctgctgtgtgctgctgtgtgtgcacgggtgtgtcttcaaatgaccccaaagatgccatgtatttagattttggagttacaagtaaattttagtgagtaaacaagttcacaaatgtgcatctgtaaataatgaaaattgactgtatttctcttcccctactgtgaaagcacctgtgtgtcatataaactagaattgaactttgggatggacatatgttttagtgccacacttgtgactggtgtctctgtagtaacccttagattttgggtgttttctctctagaatctgtccttcttcctgactccaccatgtgcacgatgggctcagctttcagaagtgctgagttggcagttttcttctgtcaccaaaagaggtctcaatgtggaccagctgaacatgttgggagagaagcttcttggtatatgcatattaacttgttatgtttataaaaattgaaattcataaaaatatctctctaattgctcttttcccctctgctattttgttaaaggtaaaaaagtactaaaatctgtcagcttttcaagctatagtttattatagctaagtgagaatcatatgtcaccttagaaagaaatatagacctgataacatttaaatgaatccgttcctcattgtctcatattaagatttctgagatgaattcccaagggaaagttttatgaattatgtaaaatatattatttgtggctgaaataagttcctggatgagaaagatgaaggcctattaaccattaaccttggggagaaaaaaggaagtccctgacatgatgagaaataaagtcctggggcttgcccactgcagcataaacccagggcccttgcctcaggtggggcccaggtagcagaggatgccgtccccacaagaggatgcctcttttgatctgcagttttgcctgattggacagagtctagacagtggtagataattccctttcagtggttaatgtcagtgcatttattagtccttcatactaaacaaatcaaagatccactagtctcaaggtcagatctttcagtgagtgaggctatctgaactatttctttaaaaatccgtggacaacttgtatccagatttgctttctgtagagcagcactgcatttactccaaacagcagtaggctcttcctaactcagtgactttcaacagtgccttcttctcttggatatgcagctgtcacagtggtggtcttgtgctgtttaatacaagtacaaaatccccttattccatttctttatttggtgagagttaagaaggatatcttttctagctgtaatggctcatttgtagttctctttgaagaccgataatgggcttaccgcctcttctcgcccaggctgctttaatttgtgtagctaataaccccgggcttcttcctctcgtttctctcacttggtttttgatttgcatcagactccctgagcccatgtcctatttggaggaaagctgagggaaatgcataaataatgtctaaaataaacttgtaaagtcaagtatcagttacattgaagatctaggggtgatcttgggcacctaggttgaactttgaaaaaaattctgtaggatccttgggagagggggctctgctgagcagcagaggaaggcagtgggaagaggcactggatagggaggcttctctaggaggcccagcagaacacctttgatttagtgcaaaaggcaaagtcagctgatggtcttggaaggaagtgtaacatgaagagggcattaaaaggactgtcctctctttagaggagggagggaaaaggggggctggggagggagagagcagatggtaaggctttgtgatgtttccgctttccctaaaaactctcatatcgtggtgcccaggaatctgccatccattcctttctgccattaaactcaaaccaacatatacatattttagaccatttaaattccgccctcttacagcacgtattataattgctcagttaatttggcattaaggtatccgaaaatgtcaactgtgtacatacaatctttgttgggtgtttggctcttttccttgagagcaaatacaagagccatccgtccaaccaaagctttagaatcagtttctgtttgctgaaaaatctggtttttatttgtttaggtcctaacgccagccccgatggtctcattccgtggacgaggttttgtaaggtgaggactgtctgggttttatgctctctaagtcctttttgctcttggttgaggttctcatgtttcttgctgtgatagttacttaactgtttgcttattttggcgtgttcttctctggccaaggagcccctcgggcaagttgtttacttttcttcagtgcaggaggttggtctccgagcaggagtctgacaggaagcacctgcctgagtgataacattctttcatatctgaaatgaggcttctgttcactcacgctggacccctgcccagcagtgttttagccatttctgtgtgaaatgtatgttgtgggctgggtggcgcagcctgaccagccagacgagtttaacggcctgctcgagcagaggggcccactgcggggaacatttagattctgctggagtcaccagacagtgcggaccagcttgcactgctggattttgctagtgtggggcagcttgtgtttccgtgagtcacgctggaggtcacccccaggctagcttgctactgtttggaaagggaagcagagcccggcccagggaagtggagagctctggagagctcctggtctgaatgctgataagagcggggagggaacttgatattccctgccaggggagggatcccattgctgtgctgaatgggacagttccatccttggcacctggggagtctttgcaaatgatggtgggaggggccatggtaagtcattgttttagatttttgttcataatgtctgcatttgtatactttcaggaaaatataaatgataaaaattttcccttctggctttggattgaaagcatcctagaactcattaaaaaacacctgctccctctctggaatgatgggtaagggccaccgatagatgtattttgaaacatatttttagtgctgcgaggttgagacaaggcctgagtccagcttcagtatttgactaggcgtgtgtgaatctcacaggagtgcgcatttataggctgccccttcagggcttcagaagagtagaacctcataacattaaccttacactttcttagtacaagtatatgtattggcaaagctaaattaaaaaaaaaaaacaactcttgagtgccattcatgcattcattcactcaacaaaaattttttgagcacctactatgtggcccctaggaaggaagaaaaacccttttaactgggtaaatcatttctatcttgacttattgccaggatcggctgatatttcaacagaagctttaacttgatcagaagggctaaaatatgaaaatatattgcctaggtcttcctctccagtaaaaaagatgtatacattcagacattgttatggcctttaaaataataaaggaacaataaaaggctcattaatcccacacgtgttattgagcatctgtagcatcctactgacaccatgttcatatcgctttttttaaaaccttagtatatacatgtataagtgaaatgcttccttaagtgtcaactgaacagattttaaaatagtctacgttttttaccgtaggttttttttctcacattccagccattttcttggtttgtaagttagcatgaaaatggaaatcatgattgaactaaaagcccatccgtccatctcttcgatatccaggtgcatcatgggcttcatcagcaaggagcgagagcgtgccctgttgaaggaccagcagccggggaccttcctgctgcggttcagtgagagctcccgggaaggggccatcacattcacatgggtggagcggtcccagaacggaggcggtgagtgggagtttgagcacatagtcccaccattccatgtgtgtgaagtccctcttcatcgccgccagtcagctcatacagatagtgcgtttgggacatgaaattgcagatcttatacttaccccaaatgagcccccgataggatttaataaaccaccacaaatgtttgtggttgtggttcactctctggaacatattgtggaaatgatggttttgaaaagacaatgccaattctttcctttgcatcaggtttgttatctgcagatcaaggatgtgagtcaatgtaatctgcaacccgttcttggaaggaatcacatttcccacaggagtaagcatccacattctcttagggtcatcccagagtagagtgtgcagatgagacaggcttcgggagaagacttcatacacatcatcagccagggagttgatgcaggacctgttgggacgagtggcagcctctaccctgccttcaaacagagcagctgcaaatttatctttatcatatatggggtttctatttaatcaaatgagtccatggctaaaagactccagaaaccttggtgttatgaagcaggtttctgagggtgaagctcaacagcgtaaatgaaaaaatcataaagaccaactgattacttttcactgttgtttagagtttggtctgtttgaagggcaggaggaaaaactgatttgttttagtaatttttatactttcagtgggtagacacaaaatggaatactcttcttgttctatttatttttctgaaatattcctcttctcctgtttttctggaatactcttattctatttgtttttctgccatactcttcttgttctgtttgtttttctggaatactcttctattttttttttctggaacggtattctttcttgttctgtttatttttcaggaatactcttcttgttctatttgtttttctggaatacttttcttgttctatttttcttctgaggaaaaagcagggaggctgagatgagagtctggcgtgggcagtagtcattagaacctgcccttttcctcttatcctgttcccttcctgaaccagctgagagacagatatagtagaccaagcagagatgaagaaaacccttggcaaccaggaaaggtcaagcaggacactaccagccaggaagggttaggatggcagcatagtctcatgttccacagcaggctccccagaacacctgaaccgtggcctctggaaggtcgacacccaaagggagattctgtatcagctaggaagaaggatctgaattcagtctgggaataagaacgggagtaaattaaaccatggtttattacgttaagggttacagggaaatgtagcaaataggatcatttttaatttgaaatgttgttttctatatatcataatttattttaataaaaaattagatttttcaatatgaaaagaaaaacaaagtgagtttatctctagtaatttaaatctgtggcttaagccaagatgatccacttagtagtaagttatttatgtgcctatgggcagcacatcattgaagatgcaggcttttaaaggtttttaataaatcttttttgcccagatttataaatctaagcaaataatggcaaatagaatgttattgagaataatacctccctttattttccctgagacagtattataatttatttagaaataaagcagtctactgtatatgttacaatgcttagattgtgattagttcttatgaggttcactcaaatccatcaactctgcagtgttttatttctctgtcctctttcattttgggatgttctatgggatttacttagcttttctcctttttagaacctgacttccatgcggttgaaccctacacgaagaaagaactttctgctgttactttccctgacatcattcgcaattacaaagtcatggctgctgagaatattcctgagaatcccctgaagtatctgtatccaaatattgacaaagaccatgcctttggaaagtattactccaggccaaaggaaggtaagtggggcaagcaggtggtaacagcgtggcacagtctttcctgatgagggggtgattattctgaaactccacccatgcagtgttttgctttcgaattggtaagagtaggctttcaaaagatggcataaactcagtgcaggtgaaacataatgcattatttggcctgatacagctagtaagaaatgaatggacaatttcctattttaggaatgttggaaaagtccattgctggtcttgtgtatttgttactatcactgtttccacatgaaaagggtttaaataaggaactgtggtaaaccaacagaaggcatcttgctcacgttaaagttgaggaaactgaggcctgggagaagtgaagtggttcatttagggtggcccaattacttactagatcctatttttattagataattattaagaggaggcctcatctgagaacacaggtctcttgcttctcagttgtcaatgaattgcatttgagaaggttcgaattagacctgttttgtttggaacacaccaacaaagctgtttttcagaatcagaaatctcaatattaggacaattactttggaatgaagatgtccccagcttaccttgacagctgtgaatattcattagccaggctaatgccaataaactggatagaactttgcatattttgggctcagacttcttgtaagatttcaagttgtgtaaagagaaagctcctagctagtgtcctgctgaacactagcttatttccagactgaattcagatccttcttctcgttgtttctgcattcccactagaattttaggtgactcaggcagggaggttatagctccttaaagttttaggaggctaagctgtctagaaacacagtagaactttaatccccccgaaaagttgatgttgtattctgatggaatttcggttgatggaaagcgtacacaatgtgtttatttctagcaccagagccaatggaacttgatggccctaaaggaactggatatatcaagactgagttgatttctgtgtctgaagtgtaagtgaacacagaagagtgacatgtttacaaacctcaagccagccttgctcctggctggggcctgttgaagatgcttgtattttacttttccattgtaattgctatcgccatcacagctgaacttgttgagatccccgtgttactgcctatcagcattttactactttaaaaaaaaaaaaaaagccaaaaaccaaatttgtatttaaggtatataaattttcccaaaactgataccctttgaaaaagtataaataaaatgagcaaaagttgatcagagtgggaaagtagttcttttcaatctagaaaaggccaaagtaatgattgagatacactgtctccacttgctttgattttgttgtttcattttataaaaggtagaaaaaattttggaaatgtcattgtcagttatttggcctgcagcactgtcttggggtgaatggatgtagccttcatgtaaaaacactgtgtggagcagctttatctgcattcaaacctcaaggtagggatgagggactccccagacatttctctggtgcttttctgtccagggtaagccacgaggcattgtcatctcagggtagtgcaccgcacatgctcacacctaggcttacccaggcagaagcggcacagattccagtctggctattgcttatcacatccctggagtgtgaaacatttcccaaggggctgggctggggacatgagcctcccatgagctgtacttttgcaaatgtattttacaagtgtatgcacttacccaaaataaaaatataacgtgataattcaattacagacaaaagataaagtgtgtaagtatgcactagtgctttcatcactcagatgttgacattgctcttttctttttccccattttagtcacccttctagacttcagaccacagacaacctgctccccatgtctcctgaggagtttgacgaggtgtctcggatagtgggctctgtagaattcgacagtatggtgagtaccacggctggcctgtgtgtagctctcaataagtgtgtgtgctcagaggcagggagcgcaccatggcagatcccgggcctgtctgcgggagggagccctggcggagccaaggagagtgcagtgctcagatgagccatgacaagttggagctgctggatttaaaccacctacatcatcagtgggatttttattcctcgcattcagcaccttccaaaaaacaagtgacatttctaatattcaggtttcctcctctcccctttaaagttgtccatgtagaaatttcatatattaaggaactaagatttctttgataagcaaatgtttttcttcggaatgcgatttcatcactgtgtctaggggagggagtgttatttttagaaagggagggactaacgcttggtagttacagtaattagagagaattatactttagcagcaatgagattacttcatctgccttatatttgagagctaatttgtacaagtagctcctggggctgtgaagggcttgccaagagtaaaaggttcaaggagtgaaatagttaatgagattcgtgatagaaatgggaatatgattgtccacaaaagggaacatcttccttttggagggtgcttttttagtatatcaactagtattgtttgcctttcagcctaaaatccttcctcttaaagattgtgcttgcttggctggatttttgctgatgctgtttaattttaagctcttttccacatggagctattccagctcatttttaaaaatttatttaatgcttccaaaaaatatcctgagttattactggcctttcttccttactgtatacccggtgcctggcaaaaagtaggtgctcaacaaagagaggaaggcagggaggggaaaggtgagcgagaatgagagggcgtcactcttcagacatttggggaatgcgatgataaggcctcagtaagatctgcctggattcaggtttctcatgtgtaattttttgacttttttcctcaccttaagcacgggctacaatcattagagattgtaccttcctacactttcctgattgttgttgacgaaataggccatttagaaaaacagttagctattgtggcagcgaaatagtttcattcctattggcaagtgtaaaatgaaccttttctgcatgtaagaaggatcctgctagagtttcgctcccaacactgctataggcctggcacaaaaatggaataaatataaagccctattcagaaaatatgttacatcacaggaactgtaaaatggggggattttttatacctcctttgttgttcctgagcaaattacatcatcatcaccaccaccattaataggtgacattaagcacctacagtataccatgtacttcacaggtagtaactcattcagtcctcacagccaccttctgagttaggtgttattgttattcctactttgacagatgtgggaacagagcccctcctccccacacagccccttttatgtaacttgactaagatcaagcagttagtaaatggtagaaagaatatttgaatctacctagtgagtctctagtgcatgcttttgtccggtatcctggaaagcctcccacaaaaagctaatctttgccccattcaaaacatgcaccctgaagaagctgtttgtacaggattgggtttattctgttattaagacaaaggcatcatggcctttgggtgagaggcccgtatgtgtttgggatttggcaatcagcattccatctctgtcatcaccattattgagaaaatagatggattggttccctctctgcagtcctgtggagcagttggactgctctctctgctctcaggatgatactgtgagaacaatttaaatatgctaagcacatgtcaggaaacagttttgtggtctttggacactcgctgtagccattccgttccatttcaggtgattttattcatttcatttgtagaataaaataaatccatttcacacacacacacacacacacacacacacacacacaccctctatacaccactaaagcctcccattaaacccatagaagacttaaagagctaaaagaggctataatataaaaaaaaaaaaagaaaagaaaagaaaaagagttcataatataggcacggcactggttagacaacggttgaatcagtctctaaattgggttgacttcacaatggtttgctgtcctgccccttggccatgacttccatccagcatctactcttagaatcagagtgtatactctgaaacagaagcagctctccccaagctggctgtcttctgccaagtctggaggttgcagctctgaaagagggtggtaccaggggccaacgcctggtgcagcctcaggagcaacaggaccataggctcctgaggaaattgtccaagagagccagagcaccagtgttctctgcagtatgacttgggcatttgtttagtctggatttcctgtgtaatcagtgttttcctctgggactgtaatagaaccagtctactctccaagaggcctttagccaaagctcataatgataggactagctattaattgtctactactttctgtctactatactaaacattttacgtatgccatctaatttaacaagcctatctgctaggtactattaatccccttttgatagatgaagactttgagatttagagaggttaagccacttgccctggtcacgcagtgacaggatctgaatctgggcttcctctcttcctctatctatctatctccccctccctccctctctttacccccacggtccaccctattaagcacacatttgaaacatcagccaggccgggcgcggtggctcacgcctgtaatctcaacattttgggaggccagggcaggtggatcacctgagatcaggagtttgagaccagcctggccaacacggtgaaaccccatctctactaaaaatacaaaaattagccagccatggtggtgtgtgcctgtaatcccagctactagcggggctgaagcaggaggatcgcttgaacctggaaggtggaggttgcagtgagccaagatggtgccactgcactccagtctgggcaacagaggaagactccgtctccaatttgaaaaaaaaaaagaaagaaagaaagaaaagagaaacataagctagactgaaacataggggcaacactttcactgtgcttttcaatccaaaataattttcctaagagcccactatgtaccacacactattgagcacttgggattaaaaaaaagttctccagaggctttccagtctagtgccatgtgtctcagtcttggtgctactggtattcggggcttcagaattatttgttggggattggtggggtggggagctttcctgtgcttcgtaggaggttcagcaacacctctggcttctaccaaatagataccagtaagcacatgcaccctcacagccagatgggacaatcagcaatgtcttcagccattgccaggggacagaatcatcctcgattgaaagcatctggtctaaggggaaagaccagtgtggaagtcagacaggaagtcactggcaggctagtatcctttggatgaacagtttacttactataagttgtcctggtcaaggcagctgggcagaaggcactggtggggagggtgaaggggttcttagtaattctgcttctttagtctgtacctgaaacacagtcattgattttacccactgagtggcctttaggggaagtgtatcatttccctctccttcctctctccctctggcatatggctcagcatttcctcacccgtttcacatgagcagatttgacacgttgctctgtccccagacttgcataacagcaaaaagctttatgcagtctggatggattcacaaaattaagccagtgggcagcagagtaataatccgtcagcttaggtgatataaaaggtcttgattagcccaggataatacatagtacatgctgaaggccctcttattccacggtatttatttgccattgcaagtatcttcctactacttcattctagaatagacaagcaatgtttaatgtatgagtctgcatttcacaagatcagtgtaataaacttaaccacattttgtctttttacagatgaacacagtatagagcatgaatttttttcatcttctctggcgacagttttccttctcatctgtgattccctcctgctactctgttccttcacatcctgtgtttctagggaaatgaaagaaaggccagcaaattcgctgcaacctgttgatagcaagtgaatttttctctaactcagaaacatcagttactctgaagggcatcatgcatcttactgaaggtaaaattgaaaggcattctctgaagagtgggtttcacaagtgaaaaacatccagatacacccaaagtatcaggacgagaatgagggtcctttgggaaaggagaagttaagcaacatctagcaaatgttatgcataaagtcagtgcccaactgttataggttgttggataaatcagtggttatttagggaactgcttgacgtaggaacggtaaatttctgtgggagaattcttacatgttttctttgctttaagtgtaactggcagttttccattggtttacctgtgaaatagttcaaagccaagtttatatacaattatatcagtcctctttcaaaggtagccatcatggatctggtagggggaaaatgtgtattttattacatctttcacattggctatttaaagacaaagacaaattctgtttcttgagaagagaatattagctttactgtttgttatggcttaatgacactagctaatatcaatagaaggatgtacatttccaaattcacaagttgtgtttgatatccaaagctgaatacattctgctttcatcttggtcacatacaattatttttacagttctcccaagggagttaggctattcacaaccactcattcaaaagttgaaattaaccatagatgtagataaactcagaaatttaattcatgtttcttaaatgggctactttgtcctttttgttattagggtggtatttagtctattagccacaaaattgggaaaggagtagaaaaagcagtaactgacaacttgaataatacaccagagataatatgagaatcagatcatttcaaaactcatttcctatgtaactgcattgagaactgcatatgtttcgctgatatatgtgtttttcacatttgcgaatggttccattctctctcctgtactttttccagacacttttttgagtggatgatgtttcgtgaagtatactgtatttttacctttttccttccttatcactgacacaaaaagtagattaagagatgggtttgacaaggttcttcccttttacatactgctgtctatgtggctgtatcttgtttttccactactgctaccacaactatattatcatgcaaatgctgtattcttctttggtggagataaagatttcttgagttttgttttaaaattaaagctaaagtatctgtattgcattaaatataatatgcacacagtgctttccgtggcactgcatacaatctgaggcctcctctctcagtttttatatagatggcgagaacctaagtttcagttgattttacaattgaaatgactaaaaaacaaagaagacaacattaaaacaatattgtttctaattgctgaggtttagctgtcagttctttttgccctttgggaattcggcatggtttcattttactgcactagccaagagactttacttttaagaagtattaaaattctaaaattctattaatctctcattaatagtatttaatataaagattcttaaaattactgacgttatgaattggtttgatgcttttctcatgtacctcaatccttattttaaaataagatcaataacactattttcctaaatgttgtccttacctgccctacacatattcagaattgctatggcagattaagacatgtcaatggaagaggtcagaggagtaatattattggaaacagctgtaataggtgccataaaaagcaaacaaacaaaagtattttggttctttgcgaccacagctgtccccaaatatacagatgattcagcacttattttaaaatgaatctgggtattgctaatacccccaaattagcagtttttaattttaaaatacatgagaaatgggactttgtcttgtctccaaagcagtcatctaaaatctacacccccacgattagatgagttattactgagaagttattgcacccacaaaaaagctgccatttttttccaaagatgtcaaaagctagaaggccaggtcttctcaaagtaaaatacactgtgtattggggaaaaaagggtaagaggcataattaccaagttaggcatagtctgtcaagttgtatttagctattatcatggaatagtgttattccctgataatgaatgttggcatcataaccagaatgattattctcatctccatatcttcgtatttacatctaggaaatataaagcttatttatagtgaacactgagagtggtctctctccaaggagtaaagtaaatatgccctggctaactagtgtaagtttgtattctacataattaaccattataagaagtcactgagtagatcctaacttaagggatatttgtttgtgtttgagtatttctcgtgtggtgtttctaagtttgaaaagtgttttataagcatagagcttatgtgtgctactggggacaaatgtctcattttaaaggaaagagggttttctgagatggcatgaaatgagtgaaatctatttattgcctgaaagctaaagtggaatatgaaggcaagtctttctgaacagagcagtcctgtcactgactaacccagggaaaggacaggaaaaagctagaaagtgttttgaaaactcttctgcttaccttttgaattgggacattaacaaagtaaggaccatttatgtgactggcttcctttggttagttatgattcattcattaattaattcatcagatttatatagagcacctgccatgagccaggcattatactaggtgtttgggaaacattggtaaacaaaagcaaagatccctgcttttatggaacttaagatattctgagacactggatcatacattctagtgcagtcaccttattaaaacttaagattttgtgatgcaaacaaacagccagaagctacaaataatgtaaatgttatatttaaaaaatacaatttcaaagaaatgacatttaaaccagttttaggaaagctgaagacaatactgcttttagagctttttaagatcagtttatattgctcttaaatgataatcctcagcttccaagtttttgtgaactcactttggtttatgtgtttgctacactcactgagaaattaaacaccttgcttgatttattgtaaaaaggaaaaaacaacagagccatacttaagcagtcttaaacttatttattaacgttatcttgagtctacagagaacagaaagctatctaagaggtagaaagctgtcaaatacctattatcaaactctgaattctcctataatatttcataaagctattataacaccttaataccttactgtcagtgtctgtttgcagcctttccacatttcttctacataattgaaacagtcttgatattcttttgccattgggactgcttgtcagacacacttcattgcagccttttattggctatttggaaaggaagcaaggggtacagtgggggcgcacacaggcctggagtctggttcattctccagaatagaaataaaaccccccagtctctgcctttaatgccttccatccagttgttttgctgtatctcatgcctcctttttaaaaaactgccttaattttctaatctttctcatccccaaacacatataatctagtgaatcacatcatttccttgcataactataaaagattatcctttcccaaaaagcctttttataagtgccacctaacacattcatgggctgcttccctgggccatctggtatatgatttatgaatttactcattttactatgaggattattagcaagtaaaattaggaaggttatcccaactcctaaaaaagttatacaaaaataaaatgatcttgtatcaagaataaaaataactattcactatttaggattattcacacatttgttgtgcctgcactgatatcctgctcctatccatggatgtgtgtgtgtgtgtgtgtgtgtgtgtgtgtgtatatatatatgtgtatatgtgtatatatatatatatatgtgtatatgtgtatatatatatatgtatatatatagctgaagttgactatatgttgcaggactttctgttgtagcacttaggcctctgcctaaaactcagcagagaagaggccttagctaataggagatagtgcatatgaataagctaatatgtatattctatccatactgggcataatcagtgttgtaggacgtagaacaacagcgcaggactaagagttctgtatcacagcccactcttgggtctcagcttcatctataaaagaagagtgagttagattagagaatttctgatgtctcttctaatcattgtggtaaccccacttgtcaccttgcatagtacctggctcatcacagttctacaatgccagtaatgcagtgactcttctagccaagtaacttactttgtgacagataactttgataaatgaaaatgtaacagtcatggtgttcatgtactttctctatggttggaaaactatacactaacccctggcctgaaaggaaagagtgctctgaagaccagggatttctggcattggaagcgaatgctattcccacgcagaataaattaggagctgaggtgtactggctggtgacactcagattctagtgtggcagtactagcttcaactctctaaataaatttcaaggctttgtgaaaataacctctcttctcattcaagggtatgtttactggttccattcaacaaatatttactgagcacttcctaactgtaaaaggatagtgtttgcatctagaggactagagacatgcctgcacatccctcaccttcaaaggtgaactctacacaggattcttgtcctagtcattgtggcaaccccatctgacaccttgtgtagtacctagctttatagcaggcattagaaatggattggaacctaaccagagatggtctgtatgctcagtggagttcctggctcttaattgttttaagaaaattcattttttccacacagttttttttttgatacatatatttattatgctgtaaaaagcaacactacctgattgcatttaaaataaatgtttcccaatttcagaatacttacaacttgtagttttaagattagattcactttgggaggttttagaagcaaatacattcatagctgtgtaatccccaggaagaatctaaatctgacatcaggtcattcagtccctgccagacagacaacagcatcaaatggtcaacagctaatccagctctgcagctaaagggcagtgtcgggcagcagtggggtatagcatattaccaaagatgagaccagcaaaaacaacaatgtgtataaagctttaaattaacatgatcatatagagcgctcaggatacagaaaaagcacatatgatactaaagccaaaacaaaaagatctttggagtttactgacggcagcagttaatagcacagtcaacagcatttaaatcaaatatattattaccagccaacagcaaacagcccgagcaggaatcggcacatagtcataaataacatcaggggtaaataacggcacatttaattaaacaacaaagattttacagaatggttttgatctgaaaaaagatgaaaactctctttgttcccaaataatggttagaacctctttttattatagaaaagcctcaaaatcattggtaatcttcaagtcacacaattcaactgtcttgtttcattttagtcacacaaagcgggctgctctttgaataaagttatcttgattgatttcagttaaaacgtgtctaccctgtaatatctttggggataatgctgctcctgtgcagcatcttacaaatgctacctgtctccatggcttgctagatccacggggtaggaaactgctcactcagcatcctccccatggaagctcaagcatgggaacagcttcgggcctggtgcagctaaggaacattggccgtggtttcaccaaaggaggtgccatctaggtaatgggagggcagtggcaggagccactggcttagactggaagtgaaaatgaaagcacctggaggctgctggagtaaggtgccatcaggcatgtaaagtttagaagcagcagagtgtgctcatagaaaaagaaaaaaaaaggaatttgctgtatgtgataacaactaacattcatgtacttgagctcatttcactaaacacagcttcagagaagtccatttgtgtgcatgtgtgtgtgtgcttaatatcagaactcctcactaacatgccactttatctcgaggtatgacaggataaaatgtatgtgtaactcctagaaaatcctgttctatccgttttttgaagccccttttacccactttccaaatgaatcctgaattaccaacccaagacaaagaattataggtcacaatttaaaatgaaatggcctttttcttattattaaactacagagcccaccaagaattacacaatagaaaaatcacaagaaatctggaatgatccagtggtcccccaaggaggacaaatctcttgatgcagactcttaatgacaggcttggaaacaaatgtttgttagttgtagcagttcccatactttcagaataactttggtagcttagagcatttctgaatttatctttaccctagaagctaaaaaaaaaaaacttcttaaagagctgcagttgcacatcccttcgctttttagactgataaacttgactaatttatacttagtaattttgtctctggttcgtcttctgtagacaaatggcaaagttctgatgccagaaataggaggcattttctgacttactatggaaaacataaaaactgcatagtatgccagctctcactttcccagctaaaggaaagaggcagatagctaaatgtctgagaagagaggctggactaaggggatatagaaaaaggaaaatttttcaaaagcattataactacattcacacatacgttttggtcaccaaacatatcttaaacagattccctgataaagtctaatcagaattggtctatcttactaacagttgttaactattatagttttttaagagtcacatcatgaagctagggtgagagagagacattttaaacacacaaccgtaagtgcatatagttgttcaaacacttaaactaaatttgtatttgaagtcttgaaaatcacactatttgcttctaaaggcaaccttgacccatttggacagactgtacaacagagcttactttataaatgcatatcagcagatcatcaccataaattgaaaattcacaaaacacaaataaatcatggaagaccacacaagctagcattggtaactatttcttttacatcaaattatacaatgcacgaggtaatattgctcacattatggagggagattgttttatttctattttttcccaaagagatcagatttgtcctgtgtgcacaatgaagaaaactccagtaacactgaaatgacaaatgtaaaatatacatcactaccagatagaaatacacatgttcttcataatcattttccacaattaaataggtaagtgatttaaatcttgggatttgagaccattacaacaatccatcaagattcttatggacggtttgattttccttcccgttgtcagaatctccttgaggtgtgtactggacttggtattcttggagaattttaaatacatcatggtgtccaaagtgcagtgcttcatccatgggagtgttattccacctaaacacgtagcacagcatggacagggtcattaggtaatttatgtacaaagatgatcaccccacattcctagattttaaatgcaggttaaatggccaaatttagctattttagcaattttacaaataaaaattaataatagaaatgcagaaagggatttataattcaaaaagtagtctccaagacaagttgggatatggagaggaagagaaaaagatctgtgaaaggatcttgtttacacatccaagtgcttatggagggagctttttaaggaaagtccttgtggtgacagatataatagactgctctagggttccagaattttagtttcatgaaaagcccaaagtatctcttttaaaataaaatgttcaaagaaaattcaggcatataacatccatcactctagcctttgacagaaaattagtgtttgtgtcaattcaaagccacagtaagtctcagaagtctagaaataaccatgacctcattagggctaaaacacactggaggagcaagattggccccaaaggaattgacatttttatcacctctggtaaggctgggaagccatggactcaatcggaccactacaccagaagagtaactcccctttccatactaataactcccctttccatgcttctggggctgtgctgtttagagtgatgtagatgaatattcaaggataagaagaaatgaagagttgccagaagtggttaatcacttgccagaagtggtaagtcttttgcaagaggagacagaactacataactcacagccctagtcaatgacagggtacgatgggtagttcccttacactttacaaactgtgaagcctgtcttcctacccaatctctctctctacttacattacaaaattctccatggctgatgatctctctttcttcatccatgtgccactggcaccaccttcctagtttcacttcttcctgtttccttctttcctttccatctctgtcctgaactttttacccgcttagtggagtcacaatatggaaacgaaaggtttttaaaacagtctcattttttaatatatttggataaattttggtagcctgtttttaaaatcaggtaagtaaaactttacatgtatctttgtatttatcaaaaaaaaaaaaaaaaaaacagctgaattaagtgactttgaataggccttcactagtttaggaagtcagtggcttgaaacagacttttgagtcatcctctacagtatgtaattatctgtctttctggaaaaatggaatgtcaactgcgtgttaccttttttacaattcttctgtgaattaatgaaaaatatgaactttaaagaatacactaatttcagccagatacagtgatgcctgtaatcctatcactttgggaggccaaggtgggtgcaccacttgaggccaggagttcaagaccagaatgaccaacatggcgaaacccctctctactaaaaatacaaaaattagctgggcgtggtggaacacacctgtaatcccagctactcaggtggctgaggcaggagaattgcctgaacctgggaggcagaggttgcagtgaacgagatcacgccactgcactccagcctgggcaacagagcaagactctatctcaagaattcacgaattctgtgcaaacctattataatttaaggtgacactgattctatgaaatagagaaaaagacttgttgaatgcctagttatcaagttagttacttagctcactttttcttatcaggtgggtacatctactttcacattcctagaggccaatttagggcaaaagaaattaatacatatacaaagcacagtaatatttccaacatgtattacatagtgttttagttgggattataaacacaggaggaaaatgctcttcaattttttgctttagaaacctggggtgggtattaaaatttggggaaagggaagaagactgtcaacctaacatgaggttttagaatactgccaataaaggagtttttaatcatagtgcttttttacaactataggaataaagttagataaccaaagtgttagcaaacttacaaaattgctaacatttgtcagacactgacataacttttctgcatttcttgcaagctaacagctgaaccaacaaaacccaagccctaattttaaaaaagatagttggccaggctcaatggctcacacctgtaatcccaacactttgggaggctgagatgggaggaccgcttgagcccaggagttggagaccagcttgggcaacatagtaagattctgcctctacaaaaaataaaaaataaaaaataaataaataaattagccaggcatggtggtgtttgcctgtgattgcagctactcaggaggttgaggtgggaggatcgcttgagcctgggaagttaaggctgcagtgaactatgatcatgccacttgcacttcagcctgagtggcaaggcaagacccagtctcaaaaaaaaaaaaaaaaaaaaaattgaagcttaataaacagaaacacaatacagctaaagagtaatcaacttgctccaaacttaatacagctcccagttctcaaatgaatccaaactcctaatacatatcaaaccaccatcaagtatgcgtttttttcccattctaaacttttattctcattactcattgactcatatactctactccagtacataatgtccaaggatatgaatctagagtttactgtacatgtatatgtgtaagctgcattcttatcccttccctgaccactttgttgacatcatttgttgcaggatgaatagcagtttgctatgtcgaccaggagagagaggagaggagcagaatatattctaggcatatttttcccactatagatagaatgcccttcttttcattctgtgccttcagtctcgtctcttccctaaagcactgattaaaatttaacttcatgaagccttctgaaactgattccaaccaaatgcagaaatttcaacaaactccaatatattcattttagagttaacagttttcttatacattttagcttgtttagaagccttcccattttgtatgtctcaatattgtgagcaagtttgtatgctgataaaattcacattattattaaaaacaacatcaggctgcataaatgtcgaatccctgccagcaatcactgtcctcaccaatcactggcttctttgcaaatcctaagagagaacattcagtgttaattatcatcttaaagtttatgcttctctaaaggtttgtcttgtctaccctgggttgttaaaaactccacgaggggtaaccagcaactgcaaaaacatacaaaattgtaaagaccattgacactatgaagaaactgcatcaactgaaggacaaaataaccagctagcatcataatgacaggatcaaattcacacataacaatattaaccttaaatgtaaatgggctaaaagccccaattaaaagacacagaatggcaaattggatagagtcaagacccattggtctgctgtattcaggagatccatctcacgtgcaaagacacacataggctcaaaataaaaggataggggaatatttaccaagcaaatggaaagcaaaaaaaaaaaaaaagcaggggttgcaatgctagtctctgataaaacagactttaaaccgacaaagatcaaaagagaaaagggcattacataatggtaaagggatcaatgcaacaagaagagctaactatcctaaatatatatgcacccaatacaggagcacccagattcataaagcaagttcttagagacctacaaagagactcagactcccacacaataatagtgggagactttaacaccccactgtcaatattagacagatcaacgagacagaaaatt

SEQ ID NO: 31 - DNA, 3213 bp, Homo sapiens
cgggtagtttcgctttcctgcgcagagtctgcggaggggctcggctgcaccggggggatcgcgcctggcagaccccagaccgagcagaggcgacccagcgcgctcgggagaggctgcaccgccgcgcccccgcctagcccttccggatcctgcgcgcagaaaagtttcatttgctgtatgccatcctcgagagctgtctaggttaacgttcgcactctgtgtatataacctcgacagtcttggcacctaacgtgctgtgcgtagctgctcctttggttgaatccccaggcccttgttggggcacaaggtggcaggatgtctcagtggtacgaacttcagcagcttgactcaaaattcctggagcaggttcaccagctttatgatgacagttttcccatggaaatcagacagtacctggcacagtggttagaaaagcaagactgggagcacgctgccaatgatgtttcatttgccaccatccgttttcatgacctcctgtcacagctggatgatcaatatagtcgcttttctttggagaataacttcttgctacagcataacataaggaaaagcaagcgtaatcttcaggataattttcaggaagacccaatccagatgtctatgatcatttacagctgtctgaaggaagaaaggaaaattctggaaaacgcccagagatttaatcaggctcagtcggggaatattcagagcacagtgatgttagacaaacagaaagagcttgacagtaaagtcagaaatgtgaaggacaaggttatgtgtatagagcatgaaatcaagagcctggaagatttacaagatgaatatgacttcaaatgcaaaaccttgcagaacagagaacacgagaccaatggtgtggcaaagagtgatcagaaacaagaacagctgttactcaagaagatgtatttaatgcttgacaataagagaaaggaagtagttcacaaaataatagagttgctgaatgtcactgaacttacccagaatgccctgattaatgatgaactagtggagtggaagcggagacagcagagcgcctgtattggggggccgcccaatgcttgcttggatcagctgcagaactggttcactatagttgcggagagtctgcagcaagttcggcagcagcttaaaaagttggaggaattggaacagaaatacacctacgaacatgaccctatcacaaaaaacaaacaagtgttatgggaccgcaccttcagtcttttccagcagctcattcagagctcgtttgtggtggaaagacagccctgcatgccaacgcaccctcagaggccgctggtcttgaagacaggggtccagttcactgtgaagttgagactgttggtgaaattgcaagagctgaattataatttgaaagtcaaagtcttatttgataaagatgtgaatgagagaaatacagtaaaaggatttaggaagttcaacattttgggcacgcacacaaaagtgatgaacatggaggagtccaccaatggcagtctggcggctgaatttcggcacctgcaattgaaagaacagaaaaatgctggcaccagaacgaatgagggtcctctcatcgttactgaagagcttcactcccttagttttgaaacccaattgtgccagcctggtttggtaattgacctcgagacgacctctctgcccgttgtggtgatctccaacgtcagccagctcccgagcggttgggcctccatcctttggtacaacatgctggtggcggaacccaggaatctgtccttcttcctgactccaccatgtgcacgatgggctcagctttcagaagtgctgagttggcagttttcttctgtcaccaaaagaggtctcaatgtggaccagctgaacatgttgggagagaagcttcttggtcctaacgccagccccgatggtctcattccgtggacgaggttttgtaaggaaaatataaatgataaaaattttcccttctggctttggattgaaagcatcctagaactcattaaaaaacacctgctccctctctggaatgatgggtgcatcatgggcttcatcagcaaggagcgagagcgtgccctgttgaaggaccagcagccggggaccttcctgctgcggttcagtgagagctcccgggaaggggccatcacattcacatgggtggagcggtcccagaacggaggcgaacctgacttccatgcggttgaaccctacacgaagaaagaactttctgctgttactttccctgacatcattcgcaattacaaagtcatggctgctgagaatattcctgagaatcccctgaagtatctgtatccaaatattgacaaagaccatgcctttggaaagtattactccaggccaaaggaagcaccagagccaatggaacttgatggccctaaaggaactggatatatcaagactgagttgatttctgtgtctgaagtgtaagtgaacacagaagagtgacatgtttacaaacctcaagccagccttgctcctggctggggcctgttgaagatgcttgtattttacttttccattgtaattgctatcgccatcacagctgaacttgttgagatccccgtgttactgcctatcagcattttactactttaaaaaaaaaaaaaaagccaaaaaccaaatttgtatttaaggtatataaattttcccaaaactgataccctttgaaaaagtataaataaaatgagcaaaagttgatcagagtgggaaagtagttcttttcaatctagaaaaggccaaagtaatgattgagatacactgtctccacttgctttgattttgttgtttcattttataaaaggtagaaaaaattttggaaatgtcattgtcagttatttggcctgcagcactgtcttggggtgaatggatgtagccttcatgtaaaaacactgtgtggagcagctttatctgcattcaaacctcaaggtagggatgagggactccccagacatttctctggtgcttttctgtccagggtaagccacgaggcattgtcatctcagggtagtgcaccgcacatgctcacacctaggcttacccaggcagaagcggcacagattccagtctggctattgcttatcacatccctggagtgtgaaacatttcccaaggggctgggctggggacatgagcctcccatgagctgtacttttgcaaatgtattttacaagtgtatgcacttaccca

SEQ ID NO: 32 - protein, 704 aa, Homo sapiens
MSQWYELQQLDSKFLEQVHQLYDDSFPMEIRQYLAQWLEKQDWEHAANDVSFATIRFHDLLSQLDDQYSRFSLENNFLLQHNIRKSKRNLQDNFQEDPIQMSMIIYSCLKEERKINAQRFNQAQSGNIQSTVMLDKQKELDSKVRNVKDKVMCIEHEIKSLEDLQDEYDFKCKTLQNREHETNGVAKSDQKQEQLLLKKMYLMLDNKRKEVVHKIIELLNVTELTQNALINDELVEWKRRQQSACIGGPPNACLDQLQNWFTIVAESLQQVRQQLKKLEELEQKYTYEHDPITKNKQVLWDRTFSLFQQLIQSSFVVERQPCMPTHPQRPLVLKTGVQFTVKLRLLVKLQELNYNLKVKVLFDKDVNERNTVKGFRKFNILGTHTKVMNMEESTNGSLAAEFRHLQLKEQKNAGTRTNEGPLIVTEELHSLSFETQLCQPGLVIDLETTSLPVVVISNVSQLPSGWASILWYNMLVAEPRNLSFFLTPPCARWAQLSEVLSWQFSSVTKRQVDQLNMLGEKLLGPNDDGLIPWTRFCKENINDKNFPFWLWIESILIKKHLLPLWNDGCIMGFISKERERALLKDQQPGTFLLRFSESSREGAITFTWVERSQNGGEPDFHAVEPYTKKELSAVTFPDIIRNYKVMAAENIPENPLKYLYPNIDKDHAFGKYYSRPKEAPEPMELDGPKGTGYIKTELISVSEV

SEQ ID NO: 33 - DNA, 4143 bp, Homo sapiens
aaagtttcatttgctgtatgccatcctcgagagctgtctaggttaacgttcgcactctgtgtatataacctcgacagtcttggcacctaacgtgctgtgcgtagctgctcctttggttgaatccccaggcccttgttggggcacaaggtggcaggatgtctcagtggtacgaacttcagcagcttgactcaaaattcctggagcaggttcaccagctttatgatgacagttttcccatggaaatcagacagtacctggcacagtggttagaaaagcaagactgggagcacgctgccaatgatgtttcatttgccaccatccgttttcatgacctcctgtcacagctggatgatcaatatagtcgcttttctttggagaataacttcttgctacagcataacataaggaaaagcaagcgtaatcttcaggataattttcaggaagacccaatccagatgtctatgatcatttacagctgtctgaaggaagaaaggaaaattctggaaaacgcccagagatttaatcaggctcagtcggggaatattcagagcacagtgatgttagacaaacagaaagagcttgacagtaaagtcagaaatgtgaaggacaaggttatgtgtatagagcatgaaatcaagagcctggaagatttacaagatgaatatgacttcaaatgcaaaaccttgcagaacagagaacacgagaccaatggtgtggcaaagagtgatcagaaacaagaacagctgttactcaagaagatgtatttaatgcttgacaataagagaaaggaagtagttcacaaaataatagagttgctgaatgtcactgaacttacccagaatgccctgattaatgatgaactagtggagtggaagcggagacagcagagcgcctgtattggggggccgcccaatgcttgcttggatcagctgcagaactggttcactatagttgcggagagtctgcagcaagttcggcagcagcttaaaaagttggaggaattggaacagaaatacacctacgaacatgaccctatcacaaaaaacaaacaagtgttatgggaccgcaccttcagtcttttccagcagctcattcagagctcgtttgtggtggaaagacagccctgcatgccaacgcaccctcagaggccgctggtcttgaagacaggggtccagttcactgtgaagttgagactgttggtgaaattgcaagagctgaattataatttgaaagtcaaagtcttatttgataaagatgtgaatgagagaaatacagtaaaaggatttaggaagttcaacattttgggcacgcacacaaaagtgatgaacatggaggagtccaccaatggcagtctggcggctgaatttcggcacctgcaattgaaagaacagaaaaatgctggcaccagaacgaatgagggtcctctcatcgttactgaagagcttcactcccttagttttgaaacccaattgtgccagcctggtttggtaattgacctcgagacgacctctctgcccgttgtggtgatctccaacgtcagccagctcccgagcggttgggcctccatcctttggtacaacatgctggtggcggaacccaggaatctgtccttcttcctgactccaccatgtgcacgatgggctcagctttcagaagtgctgagttggcagttttcttctgtcaccaaaagaggtctcaatgtggaccagctgaacatgttgggagagaagcttcttggtcctaacgccagccccgatggtctcattccgtggacgaggttttgtaaggaaaatataaatgataaaaattttcccttctggctttggattgaaagcatcctagaactcattaaaaaacacctgctccctctctggaatgatgggtgcatcatgggcttcatcagcaaggagcgagagcgtgccctgttgaaggaccagcagccggggaccttcctgctgcggttcagtgagagctcccgggaaggggccatcacattcacatgggtggagcggtcccagaacggaggcgaacctgacttccatgcggttgaaccctacacgaagaaagaactttctgctgttactttccctgacatcattcgcaattacaaagtcatggctgctgagaatattcctgagaatcccctgaagtatctgtatccaaatattgacaaagaccatgcctttggaaagtattactccaggccaaaggaagcaccagagccaatggaacttgatggccctaaaggaactggatatatcaagactgagttgatttctgtgtctgaagttcacccttctagacttcagaccacagacaacctgctccccatgtctcctgaggagtttgacgaggtgtctcggatagtgggctctgtagaattcgacagtatgatgaacacagtatagagcatgaatttttttcatcttctctggcgacagttttccttctcatctgtgattccctcctgctactctgttccttcacatcctgtgtttctagggaaatgaaagaaaggccagcaaattcgctgcaacctgttgatagcaagtgaatttttctctaactcagaaacatcagttactctgaagggcatcatgcatcttactgaaggtaaaattgaaaggcattctctgaagagtgggtttcacaagtgaaaaacatccagatacacccaaagtatcaggacgagaatgagggtcctttgggaaaggagaagttaagcaacatctagcaaatgttatgcataaagtcagtgcccaactgttataggttgttggataaatcagtggttatttagggaactgcttgacgtaggaacggtaaatttctgtgggagaattcttacatgttttctttgctttaagtgtaactggcagttttccattggtttacctgtgaaatagttcaaagccaagtttatatacaattatatcagtcctctttcaaaggtagccatcatggatctggtagggggaaaatgtgtattttattacatctttcacattggctatttaaagacaaagacaaattctgtttcttgagaagagaatattagctttactgtttgttatggcttaatgacactagctaatatcaatagaaggatgtacatttccaaattcacaagttgtgtttgatatccaaagctgaatacattctgctttcatcttggtcacatacaattatttttacagttctcccaagggagttaggctattcacaaccactcattcaaaagttgaaattaaccatagatgtagataaactcagaaatttaattcatgtttcttaaatgggctactttgtcctttttgttattagggtggtatttagtctattagccacaaaattgggaaaggagtagaaaaagcagtaactgacaacttgaataatacaccagagataatatgagaatcagatcatttcaaaactcatttcctatgtaactgcattgagaactgcatatgtttcgctgatatatgtgtttttcacatttgcgaatggttccattctctctcctgtactttttccagacacttttttgagtggatgatgtttcgtgaagtatactgtatttttacctttttccttccttatcactgacacaaaaagtagattaagagatgggtttgacaaggttcttcccttttacatactgctgtctatgtggctgtatcttgtttttccactactgctaccacaactatattatcatgcaaatgctgtattcttctttggtggagataaagatttcttgagttttgttttaaaattaaagctaaagtatctgtattgcattaaatataatatgcacacagtgctttccgtggcactgcatacaatctgaggcctcctctctcagtttttatatagatggcgagaacctaagtttcagttgattttacaattgaaatgactaaaaaacaaagaagacaacattaaaacaatattgtttctaattgctgaggtttagctgtcagttctttttgccctttgggaattcggcatggtttcattttactgcactagccaagagactttacttttaagaagtattaaaattctaaaattctattaatctctcattaatagtatttaatataaagattcttaaaattactgacgttatgaattggtttg

SEQ ID NO: 34 - protein, 742 aa, Homo sapiens
MSQWYELQQLDSKFLEQVHQLYDDSFPMEIRQYLAQWLEKQDWEHAANDVSFATIRFHDLLSQLDDQYSRFSLENNFLLQHNIRKSKRNLQDNFQEDPIQMSMIIYSCLKEERKINAQRFNQAQSGNIQSTVMLDKQKELDSKVRNVKDKVMCIEHEIKSLEDLQDEYDFKCKTLQNREHETNGVAKSDQKQEQLLLKKMYLMLDNKRKEVVHKIIELLNVTELTQNALINDELVEWKRRQQSACIGGPPNACLDQLQNWFTIVAESLQQVRQQLKKLEELEQKYTYEHDPITKNKQVLWDRTFSLFQQLIQSSFVVERQPCMPTHPQRPLVLKTGVQFTVKLRLLVKLQELNYNLKVKVLFDKDVNERNTVKGFRKFNILGTHTKVMNMEESTNGSLAAEFRHLQLKEQKNAGTRTNEGPLIVTEELHSLSFETQLCQPGLVIDLETTSLPVVVISNVSQLPSGWASILWYNMLVAEPRNLSFFLTPPCARWAQLSEVLSWQFSSVTKRQVDQLNMLGEKLLGPNDDGLIPWTRFCKENINDKNFPFWLWIESILIKKHLLPLWNDGCIMGFISKERERALLKDQQPGTFLLRFSESSREGAITFTWVERSQNGGEPDFHAVEPYTKKELSAVTFPDIIRNYKVMAAENIPENPLKYLYPNIDKDHAFGKYYSRPKEAPEPMELDGPKGTGYIKTELISVSEVHPSRLQTTDNLLPMSPEEFDEVSRIVGSVEFDSMMNTV

SEQ ID NO: 35 - DNA, 4303 bp, Homo sapiens
cgggtagtttcgctttcctgcgcagagtctgcggaggggctcggctgcaccggggggatcgcgcctggcagaccccagaccgagcagaggcgacccagcgcgctcgggagaggctgcaccgccgcgcccccgcctagcccttccggatcctgcgcgcagaaaagtttcatttgctgtatgccatcctcgagagctgtctaggttaacgttcgcactctgtgtatataacctcgacagtcttggcacctaacgtgctgtgcgtagctgctcctttggttgaatccccaggcccttgttggggcacaaggtggcaggatgtctcagtggtacgaacttcagcagcttgactcaaaattcctggagcaggttcaccagctttatgatgacagttttcccatggaaatcagacagtacctggcacagtggttagaaaagcaagactgggagcacgctgccaatgatgtttcatttgccaccatccgttttcatgacctcctgtcacagctggatgatcaatatagtcgcttttctttggagaataacttcttgctacagcataacataaggaaaagcaagcgtaatcttcaggataattttcaggaagacccaatccagatgtctatgatcatttacagctgtctgaaggaagaaaggaaaattctggaaaacgcccagagatttaatcaggctcagtcggggaatattcagagcacagtgatgttagacaaacagaaagagcttgacagtaaagtcagaaatgtgaaggacaaggttatgtgtatagagcatgaaatcaagagcctggaagatttacaagatgaatatgacttcaaatgcaaaaccttgcagaacagagaacacgagaccaatggtgtggcaaagagtgatcagaaacaagaacagctgttactcaagaagatgtatttaatgcttgacaataagagaaaggaagtagttcacaaaataatagagttgctgaatgtcactgaacttacccagaatgccctgattaatgatgaactagtggagtggaagcggagacagcagagcgcctgtattggggggccgcccaatgcttgcttggatcagctgcagaactggttcactatagttgcggagagtctgcagcaagttcggcagcagcttaaaaagttggaggaattggaacagaaatacacctacgaacatgaccctatcacaaaaaacaaacaagtgttatgggaccgcaccttcagtcttttccagcagctcattcagagctcgtttgtggtggaaagacagccctgcatgccaacgcaccctcagaggccgctggtcttgaagacaggggtccagttcactgtgaagttgagactgttggtgaaattgcaagagctgaattataatttgaaagtcaaagtcttatttgataaagatgtgaatgagagaaatacagtaaaaggatttaggaagttcaacattttgggcacgcacacaaaagtgatgaacatggaggagtccaccaatggcagtctggcggctgaatttcggcacctgcaattgaaagaacagaaaaatgctggcaccagaacgaatgagggtcctctcatcgttactgaagagcttcactcccttagttttgaaacccaattgtgccagcctggtttggtaattgacctcgagacgacctctctgcccgttgtggtgatctccaacgtcagccagctcccgagcggttgggcctccatcctttggtacaacatgctggtggcggaacccaggaatctgtccttcttcctgactccaccatgtgcacgatgggctcagctttcagaagtgctgagttggcagttttcttctgtcaccaaaagaggtctcaatgtggaccagctgaacatgttgggagagaagcttcttggtcctaacgccagccccgatggtctcattccgtggacgaggttttgtaaggaaaatataaatgataaaaattttcccttctggctttggattgaaagcatcctagaactcattaaaaaacacctgctccctctctggaatgatgggtgcatcatgggcttcatcagcaaggagcgagagcgtgccctgttgaaggaccagcagccggggaccttcctgctgcggttcagtgagagctcccgggaaggggccatcacattcacatgggtggagcggtcccagaacggaggcgaacctgacttccatgcggttgaaccctacacgaagaaagaactttctgctgttactttccctgacatcattcgcaattacaaagtcatggctgctgagaatattcctgagaatcccctgaagtatctgtatccaaatattgacaaagaccatgcctttggaaagtattactccaggccaaaggaagcaccagagccaatggaacttgatggccctaaaggaactggatatatcaagactgagttgatttctgtgtctgaagttcacccttctagacttcagaccacagacaacctgctccccatgtctcctgaggagtttgacgaggtgtctcggatagtgggctctgtagaattcgacagtatgatgaacacagtatagagcatgaatttttttcatcttctctggcgacagttttccttctcatctgtgattccctcctgctactctgttccttcacatcctgtgtttctagggaaatgaaagaaaggccagcaaattcgctgcaacctgttgatagcaagtgaatttttctctaactcagaaacatcagttactctgaagggcatcatgcatcttactgaaggtaaaattgaaaggcattctctgaagagtgggtttcacaagtgaaaaacatccagatacacccaaagtatcaggacgagaatgagggtcctttgggaaaggagaagttaagcaacatctagcaaatgttatgcataaagtcagtgcccaactgttataggttgttggataaatcagtggttatttagggaactgcttgacgtaggaacggtaaatttctgtgggagaattcttacatgttttctttgctttaagtgtaactggcagttttccattggtttacctgtgaaatagttcaaagccaagtttatatacaattatatcagtcctctttcaaaggtagccatcatggatctggtagggggaaaatgtgtattttattacatctttcacattggctatttaaagacaaagacaaattctgtttcttgagaagagaatattagctttactgtttgttatggcttaatgacactagctaatatcaatagaaggatgtacatttccaaattcacaagttgtgtttgatatccaaagctgaatacattctgctttcatcttggtcacatacaattatttttacagttctcccaagggagttaggctattcacaaccactcattcaaaagttgaaattaaccatagatgtagataaactcagaaatttaattcatgtttcttaaatgggctactttgtcctttttgttattagggtggtatttagtctattagccacaaaattgggaaaggagtagaaaaagcagtaactgacaacttgaataatacaccagagataatatgagaatcagatcatttcaaaactcatttcctatgtaactgcattgagaactgcatatgtttcgctgatatatgtgtttttcacatttgcgaatggttccattctctctcctgtactttttccagacacttttttgagtggatgatgtttcgtgaagtatactgtatttttacctttttccttccttatcactgacacaaaaagtagattaagagatgggtttgacaaggttcttcccttttacatactgctgtctatgtggctgtatcttgtttttccactactgctaccacaactatattatcatgcaaatgctgtattcttctttggtggagataaagatttcttgagttttgttttaaaattaaagctaaagtatctgtattgcattaaatataatatgcacacagtgctttccgtggcactgcatacaatctgaggcctcctctctcagtttttatatagatggcgagaacctaagtttcagttgattttacaattgaaatgactaaaaaacaaagaagacaacattaaaacaatattgtttctaattgctgaggtttagctgtcagttctttttgccctttgggaattcggcatggtttcattttactgcactagccaagagactttacttttaagaagtattaaaattctaaaattctattaatctctcattaatagtatttaatataaagattcttaaaattactgacgttatgaattggtttg

SEQ ID NO: 36 - protein, 742 aa, Homo sapiens; identical to SEQ ID NO: 34

SEQ ID NO: 37 - DNA, 3733 bp, Homo sapiens
cgggtagtttcgctttcctgcgcagagtctgcggaggggctcggctgcaccggggggatcgcgcctggcagaccccagaccgagcagaggcgacccagcgcgctcgggagaggctgcaccgccgcgcccccgcctagcccttccggatcctgcgcgcagagatgtctcagtggtacgaacttcagcagcttgactcaaaattcctggagcaggttcaccagctttatgatgacagttttcccatggaaatcagacagtacctggcacagtggttagaaaagcaagactgggagcacgctgccaatgatgtttcatttgccaccatccgttttcatgacctcctgtcacagctggatgatcaatatagtcgcttttctttggagaataacttcttgctacagcataacataaggaaaagcaagcgtaatcttcaggataattttcaggaagacccaatccagatgtctatgatcatttacagctgtctgaaggaagaaaggaaaattctggaaaacgcccagagatttaatcaggctcagtcggggaatattcagagcacagtgatgttagacaaacagaaagagcttgacagtaaagtcagaaatgtgaaggacaaggttatgtgtatagagcatgaaatcaagagcctggaagatttacaagatgaatatgacttcaaatgcaaaaccttgcagaacagagaacacgagaccaatggtgtggcaaagagtgatcagaaacaagaacagctgttactcaagaagatgtatttaatgcttgacaataagagaaaggaagtagttcacaaaataatagagttgctgaatgtcactgaacttacccagaatgccctgattaatgatgaactagtggagtggaagcggagacagcagagcgcctgtattggggggccgcccaatgcttgcttggatcagctgcagaactggttcactatagttgcggagagtctgcagcaagttcggcagcagcttaaaaagttggaggaattggaacagaaatacacctacgaacatgaccctatcacaaaaaacaaacaagtgttatgggaccgcaccttcagtcttttccagcagctcattcagagctcgtttgtggtggaaagacagccctgcatgccaacgcaccctcagaggccgctggtcttgaagacaggggtccagttcactgtgaagttgagactgttggtgaaattgcaagagctgaattataatttgaaagtcaaagtcttatttgataaagatgtgaatgagagaaatacagtaaaaggatttaggaagttcaacattttgggcacgcacacaaaagtgatgaacatggaggagtccaccaatggcagtctggcggctgaatttcggcacctgcaattgaaagaacagaaaaatgctggcaccagaacgaatgagggtcctctcatcgttactgaagagcttcactcccttagttttgaaacccaattgtgccagcctggtttggtaattgacctcgagacgacctctctgcccgttgtggtgatctccaacgtcagccagctcccgagcggttgggcctccatcctttggtacaacatgctggtggcggaacccaggaatctgtccttcttcctgactccaccatgtgcacgatgggctcagctttcagaagtgctgagttggcagttttcttctgtcaccaaaagaggtctcaatgtggaccagctgaacatgttgggagagaagcttcttggtcctaacgccagccccgatggtctcattccgtggacgaggttttgtaaggaaaatataaatgataaaaattttcccttctggctttggattgaaagcatcctagaactcattaaaaaacacctgctccctctctggaatgatgggtgcatcatgggcttcatcagcaaggagcgagagcgtgccctgttgaaggaccagcagccggggaccttcctgctgcggttcagtgagagctcccgggaaggggccatcacattcacatgggtggagcggtcccagaacggaggcgaacctgacttccatgcggttgaaccctacacgaagaaagaactttctgctgttactttccctgacatcattcgcaattacaaagtcatggctgctgagaatattcctgagaatcccctgaagtatctgtatccaaatattgacaaagaccatgcctttggaaagtattactccaggccaaaggaagcaccagagccaatggaacttgatggccctaaaggaactggatatatcaagactgagttgatttctgtgtctgaagttcacccttctagacttcagaccacagacaacctgctccccatgtctcctgaggagtttgacgaggtgtctcggatagtgggctctgtagaattcgacagtatgatgaacacagtatagagcatgaatttttttcatcttctctggcgacagttttccttctcatctgtgattccctcctgctactctgttccttcacatcctgtgtttctagggaaatgaaagaaaggccagcaaattcgctgcaacctgttgatagcaagtgaatttttctctaactcagaaacatcagttactctgaagggcatcatgcatcttactgaaggtaaaattgaaaggcattctctgaagagtgggtttcacaaggaaaggagaagttaagcaacatctagcaaatgttatgcataaagtcagtgcccaactgttataggttgttggataaatcagtggttatttagggaactgcttgacgtaggaacggtaaatttctgtgggagaattcttacatgttttctttgctttaagtgtaactggcagttttccattggtttacctgtgaaatagttcaaagccaagtttatatacaattatatcagtcctctttcaaaggtagccatcatggatctggtagggggaaaatgtgtattttattacatctttcacattggctatttaaagacaaagacaaattctgtttcttgagaagagaatattagctttactgtttgttatggcttaatgacactagctaatatcaatagaaggatgtacatttccaaattcacaagttgtgtttgatatccaaagctgaatacattctgctttcatcttggtcacatacaattatttttacagttctcccaagggagttaggctattcacaaccactcattcaaaagttgaaattaaccatagatgtagataaactcagaaatttaattcatgtttcttaaatgggctactttgtcctttttgttattagggtggtatttagtctattagccacaaaattgggaaaggagtagaaaaagcagtaactgacaacttgaataatacaccagagataatatgagaatcagatcatttcaaaactcatttcctatgtaactgcattgagaactgcatatgtttcgctgatatatgtgtttttcacatttgcgaatggttccattctctctcctgtactttttccagacacttttttgagtggatgatgtttcgtgaagtatactgtatttttacctttttccttccttatcactgacacaaaaagtagattaagagatgggtttgacaaggttcttcccttttacatactgctgtctatgtggctgtatcttgtttttccactactgctaccacaactatattatcatgcaaatgctgtattcttctttggtggagataaagatttcttgagttttgttttaaaattaaag

SEQ ID NO: 38 - protein, 742 aa, Homo sapiens; identical to SEQ ID NO: 34

SEQ ID NO: 39 - DNA, 4149 bp, Homo sapiens
cgggtagtttcgctttcctgcgcagagtctgcggaggggctcggctgcaccggggggatcgcgcctggcagaccccagaccgagcagaggcgacccagcgcgctcgggagaggctgcaccgccgcgcccccgcctagcccttccggatcctgcgcgcagagatgtctcagtggtacgaacttcagcagcttgactcaaaattcctggagcaggttcaccagctttatgatgacagttttcccatggaaatcagacagtacctggcacagtggttagaaaagcaagactgggagcacgctgccaatgatgtttcatttgccaccatccgttttcatgacctcctgtcacagctggatgatcaatatagtcgcttttctttggagaataacttcttgctacagcataacataaggaaaagcaagcgtaatcttcaggataattttcaggaagacccaatccagatgtctatgatcatttacagctgtctgaaggaagaaaggaaaattctggaaaacgcccagagatttaatcaggctcagtcggggaatattcagagcacagtgatgttagacaaacagaaagagcttgacagtaaagtcagaaatgtgaaggacaaggttatgtgtatagagcatgaaatcaagagcctggaagatttacaagatgaatatgacttcaaatgcaaaaccttgcagaacagagaacacgagaccaatggtgtggcaaagagtgatcagaaacaagaacagctgttactcaagaagatgtatttaatgcttgacaataagagaaaggaagtagttcacaaaataatagagttgctgaatgtcactgaacttacccagaatgccctgattaatgatgaactagtggagtggaagcggagacagcagagcgcctgtattggggggccgcccaatgcttgcttggatcagctgcagaactggttcactatagttgcggagagtctgcagcaagttcggcagcagcttaaaaagttggaggaattggaacagaaatacacctacgaacatgaccctatcacaaaaaacaaacaagtgttatgggaccgcaccttcagtcttttccagcagctcattcagagctcgtttgtggtggaaagacagccctgcatgccaacgcaccctcagaggccgctggtcttgaagacaggggtccagttcactgtgaagttgagactgttggtgaaattgcaagagctgaattataatttgaaagtcaaagtcttatttgataaagatgtgaatgagagaaatacagtaaaaggatttaggaagttcaacattttgggcacgcacacaaaagtgatgaacatggaggagtccaccaatggcagtctggcggctgaatttcggcacctgcaattgaaagaacagaaaaatgctggcaccagaacgaatgagggtcctctcatcgttactgaagagcttcactcccttagttttgaaacccaattgtgccagcctggtttggtaattgacctcgagacgacctctctgcccgttgtggtgatctccaacgtcagccagctcccgagcggttgggcctccatcctttggtacaacatgctggtggcggaacccaggaatctgtccttcttcctgactccaccatgtgcacgatgggctcagctttcagaagtgctgagttggcagttttcttctgtcaccaaaagaggtctcaatgtggaccagctgaacatgttgggagagaagcttcttggtcctaacgccagccccgatggtctcattccgtggacgaggttttgtaaggaaaatataaatgataaaaattttcccttctggctttggattgaaagcatcctagaactcattaaaaaacacctgctccctctctggaatgatgggtgcatcatgggcttcatcagcaaggagcgagagcgtgccctgttgaaggaccagcagccggggaccttcctgctgcggttcagtgagagctcccgggaaggggccatcacattcacatgggtggagcggtcccagaacggaggcgaacctgacttccatgcggttgaaccctacacgaagaaagaactttctgctgttactttccctgacatcattcgcaattacaaagtcatggctgctgagaatattcctgagaatcccctgaagtatctgtatccaaatattgacaaagaccatgcctttggaaagtattactccaggccaaaggaagcaccagagccaatggaacttgatggccctaaaggaactggatatatcaagactgagttgatttctgtgtctgaagttcacccttctagacttcagaccacagacaacctgctccccatgtctcctgaggagtttgacgaggtgtctcggatagtgggctctgtagaattcgacagtatgatgaacacagtatagagcatgaatttttttcatcttctctggcgacagttttccttctcatctgtgattccctcctgctactctgttccttcacatcctgtgtttctagggaaatgaaagaaaggccagcaaattcgctgcaacctgttgatagcaagtgaatttttctctaactcagaaacatcagttactctgaagggcatcatgcatcttactgaaggtaaaattgaaaggcattctctgaagagtgggtttcacaagtgaaaaacatccagatacacccaaagtatcaggacgagaatgagggtcctttgggaaaggagaagttaagcaacatctagcaaatgttatgcataaagtcagtgcccaactgttataggttgttggataaatcagtggttatttagggaactgcttgacgtaggaacggtaaatttctgtgggagaattcttacatgttttctttgctttaagtgtaactggcagttttccattggtttacctgtgaaatagttcaaagccaagtttatatacaattatatcagtcctctttcaaaggtagccatcatggatctggtagggggaaaatgtgtattttattacatctttcacattggctatttaaagacaaagacaaattctgtttcttgagaagagaatattagctttactgtttgttatggcttaatgacactagctaatatcaatagaaggatgtacatttccaaattcacaagttgtgtttgatatccaaagctgaatacattctgctttcatcttggtcacatacaattatttttacagttctcccaagggagttaggctattcacaaccactcattcaaaagttgaaattaaccatagatgtagataaactcagaaatttaattcatgtttcttaaatgggctactttgtcctttttgttattagggtggtatttagtctattagccacaaaattgggaaaggagtagaaaaagcagtaactgacaacttgaataatacaccagagataatatgagaatcagatcatttcaaaactcatttcctatgtaactgcattgagaactgcatatgtttcgctgatatatgtgtttttcacatttgcgaatggttccattctctctcctgtactttttccagacacttttttgagtggatgatgtttcgtgaagtatactgtatttttacctttttccttccttatcactgacacaaaaagtagattaagagatgggtttgacaaggttcttcccttttacatactgctgtctatgtggctgtatcttgtttttccactactgctaccacaactatattatcatgcaaatgctgtattcttctttggtggagataaagatttcttgagttttgttttaaaattaaagctaaagtatctgtattgcattaaatataatatgcacacagtgctttccgtggcactgcatacaatctgaggcctcctctctcagtttttatatagatggcgagaacctaagtttcagttgattttacaattgaaatgactaaaaaacaaagaagacaacattaaaacaatattgtttctaattgctgaggtttagctgtcagttctttttgccctttgggaattcggcatggtttcattttactgcactagccaagagactttacttttaagaagtattaaaattctaaaattctattaatctctcattaatagtatttaatataaagattcttaaaattactgacgttatgaattggtttg

SEQ ID NO: 40 - protein, 742 aa, Homo sapiens; identical to SEQ ID NO: 34

SEQ ID NO: 41 - DNA, 3712 bp, Homo sapiens
cgggtagtttcgctttcctgcgcagagtctgcggaggggctcggctgcaccggggggatcgcgcctggcagaccccagaccgagcagaggcgacccagcgcgctcgggagaggctgcaccgccgcgcccccgcctagcccttccggatcctgcgcgcagagatgtctcagtggtacgaacttcagcagcttgactcaaaattcctggagcaggttcaccagctttatgatgacagttttcccatggaaatcagacagtacctggcacagtggttagaaaagcaagactgggagcacgctgccaatgatgtttcatttgccaccatccgttttcatgacctcctgtcacagctggatgatcaatatagtcgcttttctttggagaataacttcttgctacagcataacataaggaaaagcaagcgtaatcttcaggataattttcaggaagacccaatccagatgtctatgatcatttacagctgtctgaaggaagaaaggaaaattctggaaaacgcccagagatttaatcaggctcagtcggggaatattcagagcacagtgatgttagacaaacagaaagagcttgacagtaaagtcagaaatgtgaaggacaaggttatgtgtatagagcatgaaatcaagagcctggaagatttacaagatgaatatgacttcaaatgcaaaaccttgcagaacagagaacacgagaccaatggtgtggcaaagagtgatcagaaacaagaacagctgttactcaagaagatgtatttaatgcttgacaataagagaaaggaagtagttcacaaaataatagagttgctgaatgtcactgaacttacccagaatgccctgattaatgatgaactagtggagtggaagcggagacagcagagcgcctgtattggggggccgcccaatgcttgcttggatcagctgcagaactgtctgcagcaagttcggcagcagcttaaaaagttggaggaattggaacagaaatacacctacgaacatgaccctatcacaaaaaacaaacaagtgttatgggaccgcaccttcagtcttttccagcagctcattcagagctcgtttgtggtggaaagacagccctgcatgccaacgcaccctcagaggccgctggtcttgaagacaggggtccagttcactgtgaagttgagactgttggtgaaattgcaagagctgaattataatttgaaagtcaaagtcttatttgataaagatgtgaatgagagaaatacagtaaaaggatttaggaagttcaacattttgggcacgcacacaaaagtgatgaacatggaggagtccaccaatggcagtctggcggctgaatttcggcacctgcaattgaaagaacagaaaaatgctggcaccagaacgaatgagggtcctctcatcgttactgaagagcttcactcccttagttttgaaacccaattgtgccagcctggtttggtaattgacctcgagacgacctctctgcccgttgtggtgatctccaacgtcagccagctcccgagcggttgggcctccatcctttggtacaacatgctggtggcggaacccaggaatctgtccttcttcctgactccaccatgtgcacgatgggctcagctttcagaagtgctgagttggcagttttcttctgtcaccaaaagaggtctcaatgtggaccagctgaacatgttgggagagaagcttcttggtcctaacgccagccccgatggtctcattccgtggacgaggttttgtaaggaaaatataaatgataaaaattttcccttctggctttggattgaaagcatcctagaactcattaaaaaacacctgctccctctctggaatgatgggtgcatcatgggcttcatcagcaaggagcgagagcgtgccctgttgaaggaccagcagccggggaccttcctgctgcggttcagtgagagctcccgggaaggggccatcacattcacatgggtggagcggtcccagaacggaggcgaacctgacttccatgcggttgaaccctacacgaagaaagaactttctgctgttactttccctgacatcattcgcaattacaaagtcatggctgctgagaatattcctgagaatcccctgaagtatctgtatccaaatattgacaaagaccatgcctttggaaagtattactccaggccaaaggaagcaccagagccaatggaacttgatggccctaaaggaactggatatatcaagactgagttgatttctgtgtctgaagttcacccttctagacttcagaccacagacaacctgctccccatgtctcctgaggagtttgacgaggtgtctcggatagtgggctctgtagaattcgacagtatgatgaacacagtatagagcatgaatttttttcatcttctctggcgacagttttccttctcatctgtgattccctcctgctactctgttccttcacatcctgtgtttctagggaaatgaaagaaaggccagcaaattcgctgcaacctgttgatagcaagtgaatttttctctaactcagaaacatcagttactctgaagggcatcatgcatcttactgaaggtaaaattgaaaggcattctctgaagagtgggtttcacaaggaaaggagaagttaagcaacatctagcaaatgttatgcataaagtcagtgcccaactgttataggttgttggataaatcagtggttatttagggaactgcttgacgtaggaacggtaaatttctgtgggagaattcttacatgttttctttgctttaagtgtaactggcagttttccattggtttacctgtgaaatagttcaaagccaagtttatatacaattatatcagtcctctttcaaaggtagccatcatggatctggtagggggaaaatgtgtattttattacatctttcacattggctatttaaagacaaagacaaattctgtttcttgagaagagaatattagctttactgtttgttatggcttaatgacactagctaatatcaatagaaggatgtacatttccaaattcacaagttgtgtttgatatccaaagctgaatacattctgctttcatcttggtcacatacaattatttttacagttctcccaagggagttaggctattcacaaccactcattcaaaagttgaaattaaccatagatgtagataaactcagaaatttaattcatgtttcttaaatgggctactttgtcctttttgttattagggtggtatttagtctattagccacaaaattgggaaaggagtagaaaaagcagtaactgacaacttgaataatacaccagagataatatgagaatcagatcatttcaaaactcatttcctatgtaactgcattgagaactgcatatgtttcgctgatatatgtgtttttcacatttgcgaatggttccattctctctcctgtactttttccagacacttttttgagtggatgatgtttcgtgaagtatactgtatttttacctttttccttccttatcactgacacaaaaagtagattaagagatgggtttgacaaggttcttcccttttacatactgctgtctatgtggctgtatcttgtttttccactactgctaccacaactatattatcatgcaaatgctgtattcttctttggtggagataaagatttcttgagttttgttttaaaattaaag

SEQ ID NO: 42 - protein, 735 aa, Homo sapiens
MSQWYELQQLDSKFLEQVHQLYDDSFPMEIRQYLAQWLEKQDWEHAANDVSFATIRFHDLLSQLDDQYSRFSLENNFLLQHNIRKSKRNLQDNFQEDPIQMSMIIYSCLKEERKINAQRFNQAQSGNIQSTVMLDKQKELDSKVRNVKDKVMCIEHEIKSLEDLQDEYDFKCKTLQNREHETNGVAKSDQKQEQLLLKKMYLMLDNKRKEVVHKIIELLNVTELTQNALINDELVEWKRRQQSACIGGPPNACLDQLQNCLQQVRQQLKKLEELEQKYTYEHDPITKNKQVLWDRTFSLFQQLIQSSFVVERQPCMPTHPQRPLVLKTGVQFTVKLRLLVKLQELNYNLKVKVLFDKDVNERNTVKGFRKFNILGTHTKVMNMEESTNGSLAAEFRHLQLKEQKNAGTRTNEGPLIVTEELHSLSFETQLCQPGLVIDLETTSLPVVVISNVSQLPSGWASILWYNMLVAEPRNLSFFLTPPCARWAQLSEVLSWQFSSVTKRQVDQLNMLGEKLLGPNDDGLIPWTRFCKENINDKNFPFWLWIESILIKKHLLPLWNDGCIMGFISKERERALLKDQQPGTFLLRFSESSREGAITFTWVERSQNGGEPDFHAVEPYTKKELSAVTFPDIIRNYKVMAAENIPENPLKYLYPNIDKDHAFGKYYSRPKEAPEPMELDGPKGTGYIKTELISVSEVHPSRLQTTDNLLPMSPEEFDEVSRIVGSVEFDSMMNTV

SEQ ID NO: 43 - DNA, 4186 bp, Homo sapiens
cgggtagtttcgctttcctgcgcagagtctgcggaggggctcggctgcaccggggggatcgcgcctggcagaccccagaccgagcagaggcgacccagcgcgctcgggagaggctgcaccgccgcgcccccgcctagcccttccggatcctgcgcgcagagatgtctcagtggtacgaacttcagcagcttgactcaaaattcctggagcaggttcaccagctttatgatgacagttttcccatggaaatcagacagtacctggcacagtggttagaaaagcaagactgggagcacgctgccaatgatgtttcatttgccaccatccgttttcatgacctcctgtcacagctggatgatcaatatagtcgcttttctttggagaataacttcttgctacagcataacataaggaaaagcaagcgtaatcttcaggataattttcaggaagacccaatccagatgtctatgatcatttacagctgtctgaaggaagaaaggaaaattctggaaaacgcccagagatttaatcaggctcagtcggggaatattcagagcacagtgatgttagacaaacagaaagagcttgacagtaaagtcagaaatgtgaaggacaaggttatgtgtatagagcatgaaatcaagagcctggaagatttacaagatgaatatgacttcaaatgcaaaaccttgcagaacagagaacagctgttactcaagaagatgtatttaatgcttgacaataagagaaaggaagtagttcacaaaataatagagttgctgaatgtcactgaacttacccagaatgccctgattaatgatgaactagtggagtggaagcggagacagcagagcgcctgtattggggggccgcccaatgcttgcttggatcagctgcagaactggttcactatagttgcggagagtctgcagcaagttcggcagcagcttaaaaagttggaggaattggaacagaaatacacctacgaacatgaccctatcacaaaaaacaaacaagtgttatgggaccgcaccttcagtcttttccagcagctcattcagagctcgtttgtggtggaaagacagccctgcatgccaacgcaccctcagaggccgctggtcttgaagacaggggtccagttcactgtgaagttgagactgttggtgaaattgcaagagctgaattataatttgaaagtcaaagtcttatttgataaagatgtgaatgagagaaatacagtaaaaggatttaggaagttcaacattttgggcacgcacacaaaagtgatgaacatggaggagtccaccaatggcagtctggcggctgaatttcggcacctgcaattgaaagaacagaaaaatgctggcaccagaacgaatgagggtcctctcatcgttactgaagagcttcactcccttagttttgaaacccaattgtgccagcctggtttggtaattgacctcgagacgacctctctgcccgttgtggtgatctccaacgtcagccagctcccgagcggttgggcctccatcctttggtacaacatgctggtggcggaacccaggaatctgtccttcttcctgactccaccatgtgcacgatgggctcagctttcagaagtgctgagttggcagttttcttctgtcaccaaaagaggtctcaatgtggaccagctgaacatgttgggagagaagcttcttggtcctaacgccagccccgatggtctcattccgtggacgaggttttgtaaggaaaatataaatgataaaaattttcccttctggctttggattgaaagcatcctagaactcattaaaaaacacctgctccctctctggaatgatgggtgcatcatgggcttcatcagcaaggagcgagagcgtgccctgttgaaggaccagcagccggggaccttcctgctgcggttcagtgagagctcccgggaaggggccatcacattcacatgggtggagcggtcccagaacggaggcgaacctgacttccatgcggttgaaccctacacgaagaaagaactttctgctgttactttccctgacatcattcgcaattacaaagtcatggctgctgagaatattcctgagaatcccctgaagtatctgtatccaaatattgacaaagaccatgcctttggaaagtattactccaggccaaaggaagcaccagagccaatggaacttgatggccctaaaggaactggatatatcaagactgagttgatttctgtgtctgaagtcactgtcttggggtgaatggatgtagccttcatgtaaaaacactgtgtggagcagctttatctgcattcaaacctcaagtcacccttctagacttcagaccacagacaacctgctccccatgtctcctgaggagtttgacgaggtgtctcggatagtgggctctgtagaattcgacagtatgatgaacacagtatagagcatgaatttttttcatcttctctggcgacagttttccttctcatctgtgattccctcctgctactctgttccttcacatcctgtgtttctagggaaatgaaagaaaggccagcaaattcgctgcaacctgttgatagcaagtgaatttttctctaactcagaaacatcagttactctgaagggcatcatgcatcttactgaaggtaaaattgaaaggcattctctgaagagtgggtttcacaagtgaaaaacatccagatacacccaaagtatcaggacgagaatgagggtcctttgggaaaggagaagttaagcaacatctagcaaatgttatgcataaagtcagtgcccaactgttataggttgttggataaatcagtggttatttagggaactgcttgacgtaggaacggtaaatttctgtgggagaattcttacatgttttctttgctttaagtgtaactggcagttttccattggtttacctgtgaaatagttcaaagccaagtttatatacaattatatcagtcctctttcaaaggtagccatcatggatctggtagggggaaaatgtgtattttattacatctttcacattggctatttaaagacaaagacaaattctgtttcttgagaagagaatattagctttactgtttgttatggcttaatgacactagctaatatcaatagaaggatgtacatttccaaattcacaagttgtgtttgatatccaaagctgaatacattctgctttcatcttggtcacatacaattatttttacagttctcccaagggagttaggctattcacaaccactcattcaaaagttgaaattaaccatagatgtagataaactcagaaatttaattcatgtttcttaaatgggctactttgtcctttttgttattagggtggtatttagtctattagccacaaaattgggaaaggagtagaaaaagcagtaactgacaacttgaataatacaccagagataatatgagaatcagatcatttcaaaactcatttcctatgtaactgcattgagaactgcatatgtttcgctgatatatgtgtttttcacatttgcgaatggttccattctctctcctgtactttttccagacacttttttgagtggatgatgtttcgtgaagtatactgtatttttacctttttccttccttatcactgacacaaaaagtagattaagagatgggtttgacaaggttcttcccttttacatactgctgtctatgtggctgtatcttgtttttccactactgctaccacaactatattatcatgcaaatgctgtattcttctttggtggagataaagatttcttgagttttgttttaaaattaaagctaaagtatctgtattgcattaaatataatatgcacacagtgctttccgtggcactgcatacaatctgaggcctcctctctcagtttttatatagatggcgagaacctaagtttcagttgattttacaattgaaatgactaaaaaacaaagaagacaacattaaaacaatattgtttctaattgctgaggtttagctgtcagttctttttgccctttgggaattcggcatggtttcattttactgcactagccaagagactttacttttaagaagtattaaaattctaaaattctattaatctctcattaatagtatttaatataaagattcttaaaattactgacgttatgaattggtttg

SEQ ID NO: 44 - protein, 694 aa, Homo sapiens
MSQWYELQQLDSKFLEQVHQLYDDSFPMEIRQYLAQWLEKQDWEHAANDVSFATIRFHDLLSQLDDQYSRFSLENNFLLQHNIRKSKRNLQDNFQEDPIQMSMIIYSCLKEERKINAQRFNQAQSGNIQSTVMLDKQKELDSKVRNVKDKVMCIEHEIKSLEDLQDEYDFKCKTLQNREQLLLKKMYLMLDNKRKEVVHKIIELLNVTELTQNALINDELVEWKRRQQSACIGGPPNACLDQLQNWFTIVAESLQQVRQQLKKLEELEQKYTYEHDPITKNKQVLWDRTFSLFQQLIQSSFVVERQPCMPTHPQRPLVLKTGVQFTVKLRLLVKLQELNYNLKVKVLFDKDVNERNTVKGFRKFNILGTHTKVMNMEESTNGSLAAEFRHLQLKEQKNAGTRTNEGPLIVTEELHSLSFETQLCQPGLVIDLETTSLPVVVISNVSQLPSGWASILWYNMLVAEPRNLSFFLTPPCARWAQLSEVLSWQFSSVTKRQVDQLNMLGEKLLGPNDDGLIPWTRFCKENINDKNFPFWLWIESILIKKHLLPLWNDGCIMGFISKERERALLKDQQPGTFLLRFSESSREGAITFTWVERSQNGGEPDFHAVEPYTKKELSAVTFPDIIRNYKVMAAENIPENPLKYLYPNIDKDHAFGKYYSRPKEAPEPMELDGPKGTGYIKTELISVSEVTVLG

SEQ ID NO: 45 - DNA, 31337 bp, Mus musculus
ttcctttcctggctgtgacccttctgaggacacaattgttgtaacacaaataaggacaggtgggactttcctccaactgtgggtctaatcccagccatcagttctgttgtcttgtacattgcctggaactgctcagtcaagcttcgattgtgacacagggtaatagtaactgtggcaatcattgtggggtccagtctgtcttctcctactagatgacaacctccacatgctcaaaaaacttctcatgcccattagcatctctatcccatttttataggatatgttcaaattgcttgtacaggacaaacattcaaaaacttcatgataaaaactataacccaggggctggagagagggctcagtggttaagcgcactcactactgtttcagaggttctgagttcaattcccagcaaccacatgttggctcacaaccacttgtaatggggatctgataccctcttttggtgtgtctgaaaacagtgacaatgtactcacatacattaaataaataaataaatctttaaaacaaacaaacaacaaaaccaaaaaactataccctaggaaaggtaagagtctaccatggctgaggttcagggatagagtcagggggaaaagtgagggtttgggatctctgtagagcgaaagatggctttgggtcagacatactgaacttggttccctgctctgccattttctggttgtatgatttgatcatctcatcttatgatacatcacaacctcactggcttaaaccggtacatccttgccactttccagttctggtggttgactttaactctgagatgcagtcccttttagaggtggagagagtccatttcttcacctctccaacctctaagacctgaccttcaaaggctccatttgaccttcaaagccaacgttctgactttatttcctctacctctcctttgaggatctttggggttagaacagacccacctggagaaattcagaataacttgttttaaaaccatgtgtaacctttcatccccttccttgccttgggtaacctaacatgttcatcatagttagatgggagcatctgcaagggggccggcaggctgcctaccacaggactagagcaatgacgcaacctctggcaggctggatgtttataaaatggagttccttcagaaagtgtagattaggaatagacaataactgtattatttattactaagaatttacctcagaacttaatgggctaaaccaatgccatctcagcccgcacgtgggggaatccaactagagtgcagctcaggtgtgtggttctagttgatgtctttcccaaagttgcagacaagatatatatgaagccatctaagtttgactaaggctggacacttccaagatggtgcctttaacaggtgctggtagagaaggcttcactcttgcccctccgtgggactgcaagagtgtcctcaccatatgagcaggtgacatccctcgagattactgatcccagcaaacaaaacataaaccacaatgtcttttgtctatatttttgttatttaaaataattcagaaataataaaaattaactgtaacattacccaaaagattcagactactatcaagatgatctttttcggggccagagagatggttcagcagttctgggtggtagctgctcttgcagaggacccaggttcaatttccaactcacactctgtagctcgcaaccacctataaccctagttccaggagatccagtgccctcttctagattccacaggtgctgcacatacacataaatataaatgcttttagttaaagacaattctttctcaagttaaatgtcatatggggtgccaatatgtccaccagataccagacacggtgtctcaaatataatcaaggcctctcactcctctgcttatgaattgtcttaattcaactttttaatcaaagcaggacttcattgactttctctaacctagaaatcattacttttataaaacttaatgcagtaaaagagctccccccacacaacaaagtgtgtttttaaaaaatgaccctttactgtgacctcagaaatgtgaggcccaagaggctttgccacccaaagacccctcctcctgccagtgcccttgactttcatcagtattgacctccagaaaactgtgtaacattgagtcaaccccatttctgtctcaaggagccatggtactgttgcttagaagaaggcattttcagctagtcctgcctgcaccaaaccccagacctaccgctcaccgagtgaatggagactgtttaacctccctgagccttctgttcctgctgctgtaacttgaaaaagtgatgatctctgcagccatgccctgcaaacatggaaaaccttctaacacccagcacacaggaagaccccacattactagggcaacatttagagtcagaagagcttgtcaaatgtctttggatttttgctcacttctcccaggaggtgagaaaacccaccaaggatggaattggtgtctaaccagccaggaggaggctatttcccagcctgggttgcccaggcaaaatgaatggaaataattcatccactttccaagatgtgagccaaaaagactgctttcctctcccttctttctcatcttcctgctagtcaggagctagggagccctggaccagcagcccctggaggcaggaaagaagactccatgttgaagacagcaaagagccccaattaccaacagaggaaacaaagcgctatcttttctaagccaagccatgtatctttgaatctctctgctacatcaacttaaatgcaacaaggagtttaaagggtccagccattcagcccaatattcattatttaacaccagctgaccgtagcaatctccggcccacagagacaagaacgacatgggcaccaaggagggttcacacagcagcttctttacttgcggcttttttctcttacaactctctccccagcagcttcttctttactgtccttcttgcagcaactgacctcacctcgccccacaccacctcatccaatcagaatcacacacactccaggcacaagctcaggtggtcacagataggctgacagatccggatcacaaggaatacacatgcagttttactgcatgtttgggcaaggcagtaaacatgtggggttcacggggcctggcaatgggccagggtgctgtcttggcctatgtggccgcacccgcttcccacatctccccctttttgttttattagtagctctgggatcaacatctgtcttaggttgcccccttctgtgccacatccttacccgtcatgggagtgacaaactcactttcaccatcctgttttaggctggtatgcgcatgtgagggtttacccgtcattgattactaatccagcatgttgagccaacattggggggatgttcctgcttccaaggctgccatagcctgcactaaggctcgtttatcagccctatgccaccttcgcatatgtgccatccaccaaagcattcctccacacacaacagtcagcaggagcgcccaaaaggccatcccttcccaattttttaagaatcccacagttccctggatgatctccagccattgctttgcagttgcaatctccacacgggtgttgttcacagcagcaatcgatgctcacaattccttcatctttgtgtcgagatcatgactccaatttcctagcagcattgcaccaattgcacgcaaaagatttgcagctctggaaaaaattctgatactgaacagaggttacacacattcctgacatatgagtaatgcaggaagcaaatactaactgctccaacaacagcttgtgcagtttgatagggaaatacatgagcttggggttgattttcttcaacataaactattcccatgctgcctttggatccatcagtaaatacattaacagcacctgggattggctcagtctgggtaattctggggtatatcataggatttctcatgacaaactgaagccaattagtggaggcaagtacctcaatctgttttacatcaggttgtttaccaaaagctcctcgccccacctttatactcttaagaattagctgggctatgtgggactcaacctgagttacagtaaaggcagcctggaccccataagtcaaaactgactccttcaatctttgtacaaccttccaatccaggggttcatgatacttttgcccctgttgatcctgaaatactgggaaggcccccgcaatggcgggcacatttttccagacttttgcatgaagactacactttccccttttgtcttcctcatctttataggggggaggagaagacaatggaggggctgatggttcgggtggcctgctgcgcctcaaactccagcgggacatccgactacagacgttcatgctatcagtcctgtcgctgtcactagtagaccctaccgagctagattccttcttctctttcttatctttggtttgttgtctaagctgtttaggttttcagcagctagcctgagaagcaatctccttagcctcctcaagcgccgctgctccttcctctatttcagcattgtgctttccactggcgtccctcaagcacgccctgaccaagttccagatggctaacatttttactttcattttagtcgcagagttgaacccatgttactgaaattccctttgtctctattcctgagaaccttagggctccatccccttttttccggggaacctatcaggcctatgctttcctttttttttttttttttttaagagaaaaatcaaactttattaaaacaattttctgggaggtagaaagaatacaagtcagatgggggtagtgtgaaatgcagtcttttgttcactatatggctattatatccatgactttgtagtatttgtgattacctacattggattaagacagccaaaattctagcattaatggggtagatgatcttgaaccttcaccccttactgaggagttattgacagttgacagcttctgaggaagtagctatgctcatgtacacatgagcagcagtaactggatttaatgggctggagaaaatggaataatatgctcataactcattgtatatacgattgaaattattaagaataaagaaaaataacacacaaaaatttcttttatcaggtagacaacacagcccagaactcaaaactcttgatctttagttttacacttcccaagtactggaattataggtatatgccatcgcacacaggaaaacagaaaactgctgtgtttttcatactcaatcttccgattccatgtgcattgttgcatgtgggccgtctgaagagcctattcttagtgtatcatttttattcaagggttttctctccatactgttatctttttttttttttttttttaagacagggtttctctgtatagtcctggctgtcctggaactcactttgtggaccaggctggcctcgaactcagaaatccgcctgcctctgcctcccaagtgctgggattaaaggcgtgcgccaccacgcccggcttccatactgttatcttgcatttgcaaatggatcgaaaacacttcttcatgctatggattacacattttcatgaattttagacggtcaagtgataatgaagtgtttccacattttatatttaggatttctctccagtgtaagtttttccatgtttgttaaagaagcggaataaatgaacatttttctgtattatatccagaagtttttctccagtgtgaatccttccatggtattaaaaagaactaaggtcaatgaaagcatcccataatggatacaaaccttgggtttctttccagtgtcagctatgtcatgtatttgaaaagaatcagagcaactaagtttccccatatttattacactaacagagtctgttttctctatgagtcttttcatgtttctgaacgctactgtaacaaccaaaggttttcccacaacacttacaaatatagggtttctcttctgaatgaactacatcatgccttcgaagggaactggacaaagtgaaggctttcccacactgcttacatacgtaaggtttctctccagtgtgacttctttgatgtatgtgaaggtaactggattgagcaaaggctttcccacactgcttacatacatagggtttttctcctgtatgacttcttttatgtatttgcaggtggctagaacgagcaaaggctttcccacattgcttacagatgtagggtttctctcctgtgtgagttcttttatgtattcgaaggtagctagattgagtgaatgctttcccacaatgcttacacacatagggtttctctcctgtgtgacttctttcatgtgctcgaagggtactgtaggaagtataggctttcccacaatgcttacacacatagggtttctctcctgtgtgacttctttcatgtgctcgaagggtattgtaggtagtataggctttcccacaatgcttacacacatagggtttctctcctgtgtgacttctttcatgtgctcgaagggtactgtaggaagtataggctttcccacaatgcttacacacatagggtttctctcctgtgtgacttctttcatgtgctcgaagggtactgtaggaagtataggctttcccacagtgcttacacacatagggtttttctccagtgtgatttctctcatgggcttgaacattactctgtctcttaaaagatttcccacattgtttacacgcatggtttctttctctattatggatccttttatgattttgaagagaactgagatacttaaaggctttgtcacactgtttacaggcatagggtttctcttgtgtgtaaatttgttcatgcttcagaaagctctggggagaaccaaaagccactccactgtctttacatttacatggcttctctccgtgttctttatactcatgtgttttgcatctagtctgacctctgagggacacatttagagatgaatgaccagtgatatcttctccatacacatggctttcacagggcttttctccagttttctggctcaccacaggatctggaatctcattgaagatttcttcccattgactatcttcttcatactcacaaagcttctctaccacttggtatctatatcatgcaggttcctgatggtttctctcatcaccgctctgtaaagattttcctgtgaaggattcagcaaagtccactcctccagggtgaagttcacagccacatcctcaaaagtcactgactccatgtctgtgcccaggcctgccgcggctccacagaggctccggaacaggcactcacacggccgcggaggctcagcaacttggacttcctcagctgagagctgtgaggagggaagcgccagcaagaaagatgacgggtgagcaggcctatgctttctttagttgctgaaattcccttcgtctctattcctgagatccttaatgcttcatcccttttttcctggggaacctgtctctacttacctttgcttaccaaaatttccttaccactgcttactaaaatttccttaccgctgcttactaaaattttcaaaggcctgtactttctttacttacccttgccaaccaatgcaatgagttccccatacgggccaccactcaccacagtctccaacccacagagacaagaacaacacggacaccaaggcgggttcgcagcagcttctttacttgcagcttttttctcttacagctctctccccagcagcttcttctttactgtccttcttgcagcaagggctatactctatcctcaaggcaactgacctcatctcgccccacaccacctcaaccaatcagaatcacacacgcaccatgcatgagctcaggcggtcacagataggctgacagatccggatcatgaggaatatgtatgcagttttactgcatgtttgggcaaggcagtaaacatgtggggttcacggggcctggcagtgggccagggcgccgtcttggcccatgtggccgcacccgcttcccgcagctgacacttgcctttcatgttgcttcttgcaagcctccctctcccctaaaaaggataggtagggcctgagaaccctatgggccagtagactgttttctgatgacccatccacctcacaaaggtctcagagagtctgggaggcctgccacctctctgcctctcttgtcacactgtgcttcagtgtgccatgggctgacgaagaagagagtgcccatgactggccttttacaggtcctgtacaagttcctctgacagctccaattggagttgacctgatgagcagctgtggaggtgacagagttcacatctggagcgcctgagacctctgttcctttctcctccccaatttaggacattttcatacaagttggactagaaagcaaaagtaaagacctaagcaaggctttctgctttctgcccatggtaagccctgtctcccttctgcctcaggactgggtggaggtagctgagtttctggacaaaggctgaaaaccaggactgaacagacataatcactgtccaatctggttctgccaagacaggccattctggctttgccggaacttcccttggctttgaacattttagtgggagttcagctcagtgttttctggcttacagcttgccttcatgtttgttatttttatattaaaaaaaaaaaaacagacattttcaaggctcttgtttgtttgtttctgtttgttttgttttttgagtcaggggttctctttgtagccttggctgtcctggaactcattctgtagaccaggctgtcttcaaactgacaaagatctgtctgcctctgccttctgagtgttgagattaaaggtgtgcaccaccaccatccaggctacaaaactcattttaaaaagcaaattagcaaaatgagcaaattatccaactctcagaatcccaggtgtccagatcacatctggtctactgtttttaaaatgccttttttttttcttctaggctttaatataagaggtccatgtatagtctgaaagatgtgccttttaagagggggtgggggggggcggagctgggcagtggtggcacacacctttaatcccagcacttgggagtcagaggcaggaggatttctgagttcgaggccagcctgagttcctggacagccagggctacacagggaaagcctgtctcggaaaaacaatcaatcaatcaatcaatcaatcaacaaacaaacaaataaataaataattttaaaagtcggggaggggaaggagggagaggagagtgagagggaagaaccatatattattccagcattcaacatcaatttcctgtgttggaagattcctgagtaatagtaaagtggaggcccttggctgcttgaggcagaaggctgtaaggccgaggggtattgtgacatgctccagggaaaggcagtctttcctttggctaacaggggtcccaggccattgggacaagagaaccggacagacatggaacagaggcctggggagcagccctcaagagccccaaagaaggaaaagatcaaggagcaaccggagaccccaagtcagtccgtctcaggccgcggtcgggtgctgttaataagagagttcttcaagcaggatgaaagctacacgaccctgcccaacacccaagcaacagactgccaaagtagttgccgcagtgccagacggcgactcaagcgcaccagcgacagcttggcggacaaccccgaagccccggccgccaagcggcgagcaaagatgccgcagctctcgcgtctcaagaaggaggacttgcttggttgcgagaagccttgggctccacaagggaaccccggctctgaagccgctgagatcgccgagctaagctcagagcccggcaagcagctgctcctggtgctgtgccacgcatcggcgctggacacgcagctgccgcgacttcagctgctcctgcagcaggtacgggtccaggagcgtcgcccgccagccgcgctcgtcgggatcctggtgcagccgcggccggatgaggaggacgagtcgcgccgccgtctgggggacctgctatacagcgtcttctcttcagaaaacccgggggtcgaggtgcacacagcagtgttctgtcccagccgcccccagggtgtcctggacgtccagcgcgctgataaccaagcgcacatggtccacctagtggatcgccagacccaaacggatggtgaggggcccgagggtggagactgggactgttgttccccctgagaagtgagcaaatccctgacctcagagcccctgtgttggtgccttccagacgtttggggtacgatctgaatggtaatgaaccagcgtcctttccccaagatgtgtgggctgggacagtctgaaactgttccgagttaacccagagggttacctctcccgactatctgcgccccccgcccccaaacacacacacacacacacacacacacacacacacacacacacacacacacacagtgtaggagagaaatcatgcttttataacgtcctgagggatgttgtaggacctgtaatagcccatcctcctcctctccaaatgcactaacgccattcccaagttccttaggggactctctagtctgttacttctccaggggatagaatgacaataaaagcagcctattgtgagccagtcactgtgcgaggggctcttcacctccagtcttcacagcacctctctaaggttgggacttcaaaagagtcaactagcttttaccactgtgttttttactcaaagcccctagtaaacttgtgaccccggagggttaatttgtagcctagagtcactgagcagtatgttcttaacatggactttgggcactttctgtttccagaagccccttcctgggacagcataggacccagaaaagtgttctgagcacaggcacctcgatgttccattacagaggctctgctgtcctttcagctagttgccacagcaagctatctctctctagttagacccattcccctaccacatgacatgcaaggatgaaggactgcttgatgccagaccagactcagcacgtagaggctaactttgggatggatggtgacacactcactctagtgtgcagaacaccctgaaaggccagaacctaagggactgttgttgatggggcatggtattatcacactcaaagtcttatccttgctacctaacctccaaccttttaaactcactaccacatgacaaggcttctggtttaaaaagtccccactgatgagcccattccaattgagactctcctcggggactacaaaaatcctagcctgtctttggcaacaacctcttagtaagaaaatttctgcctagagtcttctgaagggccccatccttcccctttcactctctatcgattctgaaacttgttggctctccttgcccaaatctagggcaaggggaatgaaagctaagacaaagctagacataagcctaagctaagtgcactgtgactgtgatgtagaagagccagttcttggcaggaaactcttatgaggatttctccctgcttctgaaccatttctccttaatggtacaaacattcctcaacctgtattctgtcctctatctcccagaacacaagcttgtgtgtcccataccctgtggcatccctttaaggagaaatgaactggctatttcatggctatttaaattctacccaaatatgttcctgtcccatcagattcgtttaaaccggttgttttcaaccaggaaaaatgttaacaccttctccaagctctgggcatatttagccacatctggagatgttcttttccttacactgatggggtgctggccagtcaaagccagagaggctgcagagcttcctataacacacagaacagcctcctccaaaagatattatctagcccatagtgtcaatcaggactgagactgagaaactgatttcaatcaggttatgctcatcagtcaaagtctagcagtcactgaaaaggttccagcctgattctgaatgtcatcccttcaaatggcccatagatctttgacctcagaaactgccagcttcttgtagattcacctacccactgaaccgccttgctccaaaccaaccagacacagcctgagccatactgatctaagctgcactcccaacccatatctttctctaatcttctcatgcaagaaacttaatttttttccaattctttaatttcaaagtctgtataatctgattccccattgcctactggggtcataaagaaaaataaccctttagaacttaatcttgagtgtgtcaccaatcaactagaaatggggatttagtttgggaggtacttatataactgaatttctctgaacatcaatatcctttttgggataataataatagtgatgacaataatgtaataataataataatagtcagcaaagtctttgctggctctagaagcctgaaaatagattctctcacttcactgttgacatctggtctagcctttgtgtgtagcttgtctaggacctttctggctcactcgctctccctccaccctccttactgcatcctcaccccttccccagcttctggtgtctgagtagggcaggtgtactttacccacgcagcttacctacttcatggaggaagttctttctgggaacgcacttttctattgtgatgtgtgacaggctatcttttcaaaacacttttcactcttccaccctaaaatggaagttaaattgttaagagattcatagtttgtttgacctaaccagtgttttgggaggtaataccaatgaaatgaatttgagaaatttttcgttttctgagaactggcttaaggtagaattggccaaattcgaggattcttataaaagtttagacatacacacacactcatacaagcaagcactcgtgttcacatatattcagagatgacagaaggcagtgggttgtgggaggtaaaatgctaaaaaaggaagtcaaatcttcaggaaagttccctaaatgttaaccataatgtttgtgtttggggatagacacgtagaaaccagcaacggagctgagaatccttcctattcaggatgtcttcgaataaaaagtagctctcacggaccctggaacgtgcagccgaaaggtgcctgaggctctggtcacataatcatggatccagttctcttaggcccaaagactgtcttaattagaccatggaggaacaaggcagctgctgcctcctgccggttcaagcaggaagccctgggagaggaaaccggtgccagagccctagccacaggggccagcctggcttttgtgacctcacaggaggtatgggtgactcttgtctgtgggaccttgctgtggtcaaagatcagagacatacccacaggggagactgcctacctagggagggagccaggaaattcacagctccatgtagctccacggtgttactctagaaggatcaccatgaagaaggtcaaaaagaaaaagtctgattccaggcgccgcaggaattccatttcaccgcagactagctccgattcctcacagcagcccagctcagaaaccccgccgtcatgtccagagcccgcctcgccaccatctaagccacagccttgccaggagtccaccacaccacaccaagttaaccctgagcctaaaccgcaacagcatacaccacagcctctcccgcctccagagaaacctgcctcatctccgttcctggtacccatggaacctaaaccaattcttccaagcaggaaagcaggtgggcggacttcctgctttaaggcagttctagccttcttgctgatagagtcccagagctaccagaggtgggctccagtctggaggtggtggtgtatagtcagcatgctgcccggggctaagtttataagctgtggaggggatgattttttttcccccttaggtttttcaagacagggtttctctgtgtagccctagctgccctggaaatcactttgtagaccaggctggcctcgaactcagaaatccgcctgcctctgtcttccaagtcctgggattaaaggcatgtgccaccacgcccggccaagaggatgatttttatgagagagtagaatccctaggctatgtccttctgtagcatctcaggtctcgctgcaaacagccatggatacatactaacatttacggctccatggggggagaccctctcattaggagtcagttagtatccattcagaaattaaaagcaaatatagactaaaagaaaggaagcagtgatatgccttctggctaccttttattggttattcgagaggccagaccactccaaagaagatagtacagggtgatggaggtagatgactatggtacagcctttgagagaattgggggtttctgtttgtcagatggaagataggagttttgttttgtctttccatgttaccctaagagatctgaccttggactacagagaggatggctagatcaaaatataggactcctgactaactcctaacttcagataagccacaaataatgttataatccttagtatctgttccaaataggcatcctatatttctgcttgtcatcccttcccacagaagatactagaaaagggtctgcgcaatgtataaagcaaaccaaaaatgtaaaaacagtattttgtagccatcattttaatttagtttagctctgcctaatattaaatggctggccagctgtcaaaaagaagtctccatcttcttggatagccaatgagagacaaaactttggacagtatcaaggggactcaagtggagttggaaagctgggatgctccagaccactgaggataatgaagatagacaagtgaccattgaccgttccttccatgcctagtacttcattcatccatttccgtccatcttatctgacgatactgtagggaggaaatattcctttgtcctctggagcagcccttggtatggttgaaagggaaacttgagtctattctgattccagattccctacccttgaccacaactgaccttccaataccaagaggccagcaggtcctccagagagaaggaggaggaggaagaggggatctttctctgacctttccttgaaccatgaccaaagtactctatgtccttgagcaactcacactctgggccacagcaatcctaaaacagtctgagcagagaacgaacacaaaccatgagagaaccagagctctcaagccaaggaattgccaggacaatggtgactctgtgactggtgtctgtatgcaacatgagcttcaaccatgtagacatttctgggtgatagcctcagagctggtgtcagtagaaagcaaaaccttccagcaccacatctttaaacctttaaaacgatagggtattgaagaggcaaaggagggactgtccatggcctactgaatttgttaactttctcatcaccgtgacccagttatctgagaaattactgaaacgatgacttattcacgttggctcacggttttaagagtatccacgtatcacggcaaggtgtagctcacagtgaatctgctaggaagtggagagagggattatgtgaagggcccaaggcaagatataacccgcaaagatgtcccactgatgccctacaacacctgctagaatccgcctcttagcctttaccaactcccaataacatgacttctagaactgtcctagagactgtgtcccactcccaagaaccaggtgcagtcctcatctctctccttctctgtccagcagtgcctctgacctatgtggccccacgctcctgctcctgtgcagcctgcccgggcagctccgcttgctggcatcgtctggggctttgccatagccgaatctttgatgtcctcctacctcgggactggtcatccatgccagggagaggagtcccaaaccttctcaccttctacaggttcccgcatgaacgggagggctaaaaagccttgggtgtagagttcccagggccaggctcggtcctcagatctggttggcaactgtgtgtaacttcctccaaacatcataggcttttcaaaagcaaagcctttccttctaaataacaatgtctctggtttggtgggccagctctttgtctgttcctttttctatgaaaccgtcttctctgctgacagcaccctcccacccagcccattgtaaactccagagctgtgtgattacacattggttagccattcacttttttttttttttgacccataccatacacagggagtgtctatttattaaacggcatgttaattatctctggaactcaatgataaacctgatcgcgtaactcataggtcccttctgccaataatagcaaaatctgtcccacacagaacatgccatgcttttaccaggagtcctcacaggggccatgttttctagaccagtctattagcatcagctccttcctttatcatgacatcacccagtctcggtcctattgctcctcttccacaatgcctcaagagaaatgtcatatgtcatctacccactggcacccatgaaaagggttctgtccatgttaagaacagactgaaaatgtcctcactctttctgagtcatgtgttggggccaggagaggggcctctacccaaatgagccaccctgcttatactcaggacttcacaaaaccccttggggatctcatatcgctacatcaggagcacagcccaccatgccatcctcctctcttaccctttccagctccttctcttgaataataataataataataaaataataataataatacccacacagatacagagctatttggtgaacagagcatacctagagtcagagataccatctattgagtcccggccaggaagagtctgcccaccactcacccacacagtctgtctgtccattcatctgctgccagatggtgctgtgtgttcccctgggtgaaaaaatcaaatcctactctgggaagatgctaggtggtctgagagacacctaaacaagatcttcaccttccagtgtgttcagcctgtgaagctagctaagacctgtgcatttagaaacctgtgcacaaagcaagtagtgtgtggaacaggagggcttctgggagtttcagagtaagacaatagtaccatatcagggtccacagcattgtgtgcccagtgtgtgagccaactccaaaagtatccttggatccctctctggcttaggatggaaagaagggctattctaggctgtaggaaaagccaaaacacagttcagagttaggaatgcaagcgaaagaggcatagaaccccatagccagggcaagagtttatttttccacgtgagtccctgcttctgcagtctttaccgtctcagaggacttctactaggcatccatggagacaagaatccctcctttagttggctttttatcagactagataccacattttctgaatggcttcctgacttatactggttcactggttcctgacttatactggtttgctgtcccagtctttgtagagactgtaattaatatgttatttcctgatatctgaaaaatctctaaaatgcctcagagggttgctgtgaagcttaaagaggaggtgagtgggaggtgtctggaacaagacctggcacatcgtggtctggaccaacctcgtaccctgttgcccctctgggcatcagtcgcaggctaccgaccctcataccccaggggtctcgtaggaagttttgtggagagaggtgagagcaatgtgtccctttgggagaatgatcaggaggagactctaagttccactgtctcattgcagtacacagcctttctccccaacccccactccctttctgctttgctttgtagaaaaccgtcaaggaagtactgcgctccccgtaactctcgtgcttcaagctctcggaactgttgctgtggctctgggggccttgggagttgcctacttcatggctgaatccttgtgaattggaccccaggcccaccgtccggcaggtaggaggatcaccttgtcccttttctctagctagagaagactatctcaaggtggactaggcctttaggccttcagcctgtcagggaaggttcatgatcattcctacctcaggactctttcaagcctctctggagacctttgattagaaccatcaggacaaaggcccttcatacagccccgtcccctgacctatggcttccctagtcctagatgggaagaagtaggggaggggaagggtagagattatctcggataagccccactgctgaatccccaatttccactcacaccagtgttctcccgcctgtaccaagctcatgctatgcatgcttctttggaatgtgtgtgatctctgccactgctcatttatattacaccatctctgcatatgaagatgtcttcagtcaccactcctgtctcacctgaacccagaagcaaagacccaaacaaggactgggtgcaccagataactggaggaagtactctcaggacaaagcagggctgggtgggaggcaagagcaaaagcaaaaggaagaagggaaggcttcatccctgtggagtcctagaatgttatctgtacaacagatgctcttcctcaagagacacgaagcttccctttcatttccctgtgtcagttggtcaatatgtgactatgtgggtgtagggaggaaatttgagttctttgtgtaaaaagcaattctcctcgagttgagggcaagtccctgaaggaggagggagctgttggtcacctgcagccaaaagtcatcattcaaagagccaatggctcagtcaggaagggaactggaaagaggtggtcaccaagagcactcactcgtaggcatcccaacagctaggtcttcttcaaatggtcttgaatgcttaaaaggtgatggttgaggtagggagtgagagccaatggaaacatttcagtccgccccttccgtcctcccatcccatgcatgggaatggacgggggatggttgtagacaagcccgggtctgggaatcgatgcttgaaatgtataaacatccaaaccctgtgagagtacagcatcgcccctagagcgtctgatgactattcaaggatcatttgaggaataatattaaatattaaaccaccctgacctccaggagacagcacagcacttaagagccttgtcttcccttgccctggacttactgggagtggtgggatatttgttattatgttatcatgctatcatgtcagcatggtgtcagagaagatgctggctctggatttaaactgacaatctctagtctagacagtgccacttggaatctcagtgttaggggcatgattgtcaatgtcatgtctaatggagagtaagctctctcagaagatgacggtcatgaggatccaaagagagatattaagagttgaagtcccagagacggaatggaatgaggagtttattgtgtctactgaaccgatgatgcatataccaaatggtccaatggcaggctggcaggtgctgctgtacccctgtggtagcaggccttcctattataggagcctaatgaaaatgttgcattatttgtggtctggtatatttagtatgttcaaaggcctgttttttcccatctgacatagcatccaaaccagaagaggatcccactggccaggaagaagtgaggtggaactcaagtgatgtagggcagtccaaagttcccactgctatgggcaaaatgtttctagaaggttctatggtagtataagttcatagataccttgtaggtgtaaagcccagagaactaccactctaaaacatatacaatagagaagggctttatgggtacagtgacctttgaggctccttagtccctatgaaaggaaaaaaggtagctaggtatctctctgtccaaaatgaaccttcatcagaaaagcaaagctgcctcctcttagagaaagatgcttccagaattttctttcccaaatcttggagaaccagcctttcccatagcatttttcctcagctgacaatgaatcaacaaaagcaaaagattcctttgggacattgaatatgatcaaactctacaccatagccaatgtctgggggagggaggttccatctcagctgctcaggtctctaaggagtggggagttaacataaaaggtgctgacattggctgagcccaggagatgttctaggacttcacaaatagtgccataagccttgagttgaagcagtctgactgactttgaagaagcaaacaagaaaaaaggaagagataagtgaagaaggaagaggaacaggaggagaaggaaaaagaaaaggaggaggagaaagaaagaaaggaaggaaggaaggaaggaaggaaggaaggaagaaagaaagaaagaaagaaagaaagaaagaaagaagaaagaaagagaaggaagggaggaaggaaggaaggaaggaaggaaggaaggaaggaaggaaggaaggagagagaaagaagccaaatagaaggaaattgaattctaaaataatttacctttttgcaaaaaagtgtttagccattgaaccctcacaggtaagactatagagtggaaaactgatgagataggtcacaggaattgattaatgaagctaatgatgctgtcaattattatttattttttccttacagatccagtttccatcaaaggatcttacttgtcaccaaaatagatagagagaaactatcttgtctcttttcttcttcttttttatttttttatttttttgagacaaggatttgttatgtagcccaggctagtcttaaactcacaatcctcctaccagagccttcagaatgctagggttacaggtgtgtgccatcacacccagctagaaatctgtcttcagtgtgttttactcagaaacataaaagttggatctagcacagaatcgggaaggtgagggtgggctaaggacctactgtttctttacaaatggtcaaggtgggattccagacggaaaaaaatcagttcctgacaagggtcgtttttacttaggggttcatggcatggcaccccaactatgccactctgcgtaaggattattctaagaagaaagtcattgagaaactgaagctcgtctctgccctctctgatctacctgagaacagcataatctctgctattacaatgaggtgacgccatcccgggaagggtgaacagtcttgtccctgaagacagcacacaggaaaaccatcccacacaaagtctgccttgtctccatatcggtgtccttccacagtcagccaccattcacattcaaacctcttatagcttccctacaaaattcttgctgtttatggggatgtctgtacatcttttgtgtcatttgctctgtgcacaggcactgcctcattaataacttgtttttctcttgctaatctgccctttgtccatctaatttggaggacacagccaacaaacctaacacgggtaaatgaaaaagtatttctccctccatattagataggaagtttttcaatcccaccccccaaaatctgtatgttaaaaccttagccagtgcccaatatgtcagtatcagaaggtggagcctttggaacatgattaggtcatgaggtagtaccctcatggaatgattttagttcccatattaagtaaaaaataaaagacctcagagggcctggatgtagctcagtaggtagagtatttgctgaacatgtacaaagccccgggtttaaccatcagcaccacatagaccaaatgttttggcacacacctgtaaacccagtactccctaggtagaggcaggaggattacaaattcaagatcagcctccactacatagcaagtccaagagcagcctgagctccatgaaaccctgtctcaagcccatttgtatctctaaagagagtttctcctctgctctcctacctcacagcactcaagacttctgtgacctcatgaggaggggagacgtctcccccacagaaagtaacagtactgctgtggttgacacctctgggtctctccaatccagttctaacacgacctgcctggagacagatcctattgagagttcaggtggcaagactgcttctattccacaggttctagacccaggtcctgtgcctctgacccactagcataaatcatggtctctcccagccctcctcaaagttgggtttactaagatggctctaggaagccagggaaacatctttattagcttataaagatctacagaggaggtgggataaggaacttccctgtcctctcccagggcactatcctcggtgaactgtcatttggtcagctacctaggaccgccccatccttgtcttggatttttatggagatttcgttgcctatgcatggtggacgcacagacagctgtgcagagatgtgattggacaaaaggggtttgatccagtgctgaatggatcagggctgaggaggatagacacagcagggcctctttggatttttctcagactctgggtagtatatcaccctccaggcagttagatccctctggaatgaggaggctcccgaggcctcatgtagatcacaggcatctttatggccagctgcaaaatgggtaggagagagtttctatagcctaccttagggaaattctaacattatggcctgctctgggagggaagactcaaagtgacgagtataaatttaaaacacagcacaccgctagcagtatttttgagtagcagcgcaaatggactaataccccacactgtttttgtgtattctcaaatctttctatcatggtccactgatgagaaatccccactcttcactgggctgtgaaggtggcaccctcgaaaactggcattatagaaaagtaaggaggctggggagatggctcagcaggtgcagacgtatgcggcatggttttggggagtaaataagataaagcattagaaccaattcccaacatcgctcagcctgctttcttacagaactcaggaccactagctcagggatggcaccacccacaatgggctgggtcctcccccatcaatcactaagaaaatgccctacagctggatcttattgaaggcattttgctcaatcaaggttccctcctttcagataactctagtttgtgtgtcaataagatataagactagccagcacccatgccgatgactttgaaatgcattggggggggggagggtgtcaaagatggcacatcctcagccctgtgacccaaaatgcacacagcgtacctgcagcaaggcctaggacagcagtactggggaaccctcggatgcttggcttagtccttcctaggggtcacttcaacaggctgaccacaaactacagaaggaggacctgtgtcctgaggagtcataaataaggagagacacaagctaaggccctctgctttctcatagtggtctccaaggggtgctgagtgtggtgggtcaaggacctaccatgggttcttgtactggggccaagccactggtgaacacttgaaggtaaggtcttccttcttcaggctgtctcttgagagcaaagattagctggggaatctgttcaaggcagcatttataaattccacaggtaactcttaaggcaaaagggatgtagatgaaagccttatgaagagaaggtgaatcctattcaaacgggagcagtcaggccccacacaccaaggctcttagcctctctacaatgctgcaaactccttgagtaagaggaggctcaacgctgggaaaaagaggccttcttgggccttggctgcgagtttacttttcaaagctctgctccctggaaacctgcagggagaagtgactcacacacacatcccagcatccactgctcttggcaaaggcagcttcttgcctccccagcttggagctgctggggatgcagcatggatgctttccttcctagtccctggacggctcacacagacctcattcacaagccggctattgaatgcttgctggaaatgcaaattgctcagcagtgagtcttcttttcacacactaaagttgcatactcctgagagctgctaagcaggacaggcaagcatcccagagcaggaggctcccgaagaactaatgtttgctgttaaaggaagcagaacttggagctggcagccaagcaggacatgcaccccgctggcggttctgcaggtgtctggcctcttgccccttcgtgaccccgggcttgcctcttttgttccttcatttgagtgccacattaatcatgggtgactaaggaaggactcaacccaacagagttgttgcccatccacagttcaagtccaaaaagctggataagctactgagtgagccacttgctcccctccacccaagaacctgaaggctctgggtacagtctcccacccagactctgaggataactcagtgagcacgaggctggctgactatgctccctaccacgagtgctcctgacccagccctcacccagtaccttggggtcccttccttccccaaggttctctctgaagttgaggtgttctttcttctcaggcaccaggtaggagtcactgggcctgagataactgaagagaacaggctcttctcttctcttcaagcttcccattctccaccaaacaaaatacaataaaaccaaacaaccaccaccagcaacaacaacaaaaaacccacttggttaaaatgggtgtttaccctccgaattctgtagactttcataccaaagatttgtagcctgtttccactttccaagagaatcattccacataatctgtttggtggtgggatgttttgttttgttttgttttttgacaggatctcaccatgtacccttggctagcctgaaacacattgtgcagagcaagaaggactcaaacccatagtgatcatcctgcctctgcctcctgagttttggacatgtattaacatgcccagctttctttaagatagggtcttactatgtagcccaggctggcctagaactcatgatcctctggtctcagcacttccagtagcactggggtaacatgtgtgccaccatacccagacaatttctcatggttgcatgatgttcccgcatttacctggtttataatggatcgagtataaatcatccagacttaattagtatctggctcaccatatcaatcattgaattccgtctatggtgtcagttatagtcacacatgaaggagaggaaaccaggtctatctgccttggacaacaaggggaatatggcggtttatgtaactgtataatccacaagtagcaggctttggggtaggttttattcaaagccttttcttctccactccccattttgccttctgtggaattagtttcacccggtggctatgatagttgtgttaggggcagaaagatgcaattccctcctcacccatcataaggggcctgtcctacaaaggcagattaacaaaagcatactgcctttactgaatctgtttcatttaacactcaagcccttcggtactgaaaagccttggtctgttgaagcatagctttaatcccaccattagggaggcagaggaggctagtctgattcacataaaagagttccaggccagtcaaggctacacagtgagaccctgtctcaaaaacagtaaataaatagccaagccccaggcttaggtttgatgaagcgtagacagccacatcgacatgtcactggacagcataaaactcacagcctgaagacaaaacccagcaggacctgtcttctccgattcttattgatctcagggtagcatttttccctcctggctatggggcagaaccatctggaatgatagccctcgagggagatttacttttagatttttatgacttagggaaaggttcttggggaagacaaattcaggtttctatgactcttcaggagggagggagaggtaaacgggagaccaaaatggcagaaagtcagagctactttgcttctaagaccttccggcctgcttttatttagttcaaaggatcatcatacaatgcatcatactttggagtattgtcttctgagccccagcagctgccaacagtacctaacgctacaatagatctttgtccccatccagatagagtgcccatgagcctgtcatgccaagcagaagtcctgtgcttcaggcttcttggatcggcatgttacaggaacaccaatggctgggagcagggaactggggagactcagttgacttacacctctcagggcctgccgtgagttaggttggaatcatctatccttggagtaagtaggctgcatgagagaagacagaatcagaataaaaacccaggtattttaaagaaaaccatgaaatactgagggttttaacatgtgtcagtcctcagtattaggggtttttttgttgttgttgttttgttttttccaattgaaagattctttttcgagggaactacaggcttcttcagtgcttcccttttgtaaataccacaacgggcatcctccatagaaatgttggcaaaagccccttctcaatgctgttgccctctgagttctaggtcttttccctgtttgtgccaactcttcaaggttgccttaccccttctagatacattctaggtctctctgtctctctctctgtcttcctctctctctctctctctctctctctctctctctctctctctctctcacacacacacacacacacacacacacacacatacacacacacaagcaggctatctcacaccttcacgattattatctacccagactggtccagatggctttctgaggttagaaaattcgaaacttccttctcatcccaggacggtcaactgtgatggagatcactcacattaatcagaaatcctaatcagattgacccacccgccttgtgttttaaatctaattctttaatcactttaagccaagcacattctttttttttaattaggtattttcctcatttacatttccaatgctatcccaaaaagtcccccatacccccccccccactcccctactcacccactcctactttttggccctggtgttcccctgtactggggcatataaagtttgcaagtccaatgggcctctctttccagtgatggccaactaggccatcttttgatacatatgcagctagagtcaagagctctggggtactggttagttcataatgttgttccacctatagggttgcagatccctttagctccttgggtactttctctagctcctccattgggggccctgtgatccatccaatagctgactgtgagcatccacttctgtgtttgctaggccccggcatagtctcacaagagacagttacatctgggtcctttcagcaaaatcttgctagtgtatgcaatggtgtcagagtttggaagctgattatgggatggatccccggatatgacagtctctagatggtccaatctttcgttacagctccaaactttgtctctgtaactccttccatgggtgttttgttcccaattctaagaaggggcaaagtgtccacactttggtcttcgttcttcttgaatttcatgcgtttagcaaattgtatcttatatcttgggtatcctaagtttctgggctaatatccacttatcagtgagtacatattgtgcgagttcctttgtgattgggttacctcactcaggatgatgccctccaggtccatccatttgcctaggaatttcacaaattcattctttttaatagctgagtagtactccattgtgtaaatgtaccacattttctgtatccattcctctgttgaggggcatctgggttctttccagcttctggctattataaataaggctggtcaagcacattcttgatagagatttgtctagcaatcaagtatattgaccttccggtattcatgcaatggaaaagcccagaagtctgttgaaatatgacttggatggatactgtagtatgctgcccatggatgagctggctctccaggatgctggtatagtcactgctagccacttaacatctatacctctgtctgtgcattgtcttaactaaagaaagctgcctcacccaagatcataccacttcccaaaaggcaaggtaggttgaagaacaagaagcacatgtacggctaaaaacaaaacaaaacaaaacaaagcgaagcgaagcgaaacgaaacgaaacgaaacgaaacgaaacgaaacaaaacaaaacaaaacaaaaccctggatcctcagttgagaataatcctggaagaccatcccaaatgaatgaaaaaagatgaggacatgacagcccctaagtatagttgaggaagagtatatttgtagatatgaaggagtgcataagccagagacatctggaagggtccagactgaaccaggccatacgtgatgggtagggggatggatcatgctcaatgtgagggtcccaaataaccaaccaatcaaccaaccaaccaaccaatcaataaaaagtcacccccagcaacctagcaacttaaagcaacaatgtgttatttcccacaagaacccagggttgtctctcagccttgtggcttctctccacagtgaccagcgcctctttacacacagcagctgaattccaagagtgtttcaactgcacacaccacagtatacatccatgtttcaagctggcttgccctttttggctaatgtcctgttagccatgccccgagtcccatagggaactccacaggaatgttcttcctcaggggccaccagctcaataacctatcacaatctaccttctgactctctcttggtgatctataactacttgcaaaatgagtcaccccttagagcaaaactggacttccagggaatcttttaaaacagtcagatgcaggtttgaagtccaaagagtcactattaaaaggtgcttcaggtgaggtattccaagggctattcctggttaaagggctacaaaggcggactgtctccccagcacacagaggaaacacagcaggaggaacagagatggcaaaatacttcaggagtctcatccaaactgctgagtgaggacaagagggttcattataaccactagtccatagccaatttaaaaaacatctaaagaccttttacttagttggtggttcagtcaggggactgacctaggccctctgcacataggttacagttgtgtagcttggtcttcttgtgggactccccacagtgggagcaggggctgtctctgactctgttgcctgcctttttaggcccctttcctcctattggggtgcttcatccaggcttcctaggagaggaggtgcccggtctcactgcaacttaatatgccctcgctggttgatatccatgtcttcttctgaagaaaaacagaggagtggattccgggtcagacaggggtaggaagtgggggagggaggttgtgggaggagacagggaggaggggaaggagaataaacttatttggttgttattgttggtttttttttttcagacagggtttctctatatagtcctggctttcctggaactagctctgtagaccaggctgaccttgaactcacagagatcagcttgtctctgcctctgtctctcaagtactgggatttaagggttgtgccactacctccaggcctccgttagctttttaactaagcctcttggtgatagtcccagtattttttctaggatccaggataggcacctttcatttatccatgcccttgaactccagtttgcctggccagcccacctcccccaacccccatttcctcctatctggaggatatttggtgtgctagtgctccgttcaccaatcacacacacacacacttgagcagctacagaatgtaggaggaagttctgcttgtttgagcaatgttcctctcaaccttagggcagtggcccaggagacctccgtcctgacttctcccctgttcagtaatcacagatcctcataagcccttagcctaacctggcctttcctctgggtagactgagctgtctccacagagaatgggcagcttccagaacttctagcctcagacaacccagtagcatctggaaggaaagaaaattccagagagtagctgagggcaggggctgaagcaaatggagactgtggaaggcaagggtctgtgaggagctgcagttacagcggagctgcaaacaccagtgactgaagagctctagaaagctgctgagtcacccagaggagctaggagccaagggtcaagcaggccaagctcagagctgtgacactcggtgtggacactggcttcctagcactcaatgcctccggaagcctacagtgtacgtcactggcctgtgtctggccaaaccaagtggctttggaatcactatgatactaattaacaagccatctgtacctctttaagaagtcagatcctgacagattcccatgcaggtgctgctgacacactctctgtcattgaatgctgagtgtctctgtataggattgttccctctagctctcacaggtggtgcaggcacccatctgctcttcttcctgatattattcccgggcccagcaagaacacaataggggcttccttgagccagggatctgtcttataacactttatgttttgttttgttttattgattttttttaatgtttcaggatttgtgtgtgtgtgtgtgtattgcctgcatgtatgtctgtatactatatgcatgtctcgtacctgcagagcccagaagggagcatcagatccccctagaactggagttatagatagttacgagctgtcacacgagacctgggaatgaaacccatgtccctggtagaggattgctcttcagagctgtgctatctctccaacctctccccaaggcttctttacacagcttcatcaagaaaggctgagaggattgcttctttctgtatgaatgggagctggcatggaaatatgttttcctggtaccagattgaagccagccaagtagataaagaaacacttccaatactggtgcccagtctggccatgcagcggccggaaccagcccagggctagccactgaatgcttacggtccggtcaggatgttttcagtctgtactttcttcccactcaccttatttttctaggaatgaggtcctgtggcttctctgatttctactcaggaagctcccagtctcccagttctcacctgccactgcatggcccataacacaagagacagctcggagaaagagaggcaggaagcaaaggaagaaagaatggtggaagccattggttagcacatgcctttaatcccagcactcaggaggcaaaggcaagcggatctctgtgaattcgaggccagcctggtctacaaagtgagtccaagtcagccacgagaaatcttgtttctacctccaatccccaaaagtgaaaacaggcagaaagaggtgaagcaatgaagaggaaagaggcaccaaacaaaggggtgagaactgcat

SEQ ID NO: 46 - DNA, 1297 bp, Mus musculus
ccgcggccggatgaggaggacgagtcgcgccgccgtctgggggacctgctatacagcgtcttctcttcagaaaacccgggggtcgaggtgcacacagcagtgttctgtcccagccgcccccagggtgtcctggacgtccagcgcgctgataaccaagcgcacatggtccacctagtggatcgccagacccaaacggatgcagagacatacccacaggggagactgcctacctagggagggagccaggaaattcacagctccatgtagctccacggtgttactctagaaggatcaccatgaagaaggtcaaaaagaaaaagtctgattccaggcgccgcaggaattccatttcaccgcagactagctccgattcctcacagcagcccagctcagaaaccccgccgtcatgtccagagcccgcctcgccaccatctaagccacagccttgccaggagtccaccacaccacaccaagttaaccctgagcctaaaccgcaacagcatacaccacagcctctcccgcctccagagaaacctgcctcatctccgttcctggtacccatggaacctaaaccaattcttccaagcaggaaagcagcagtgcctctgacctatgtggccccacgctcctgctcctgtgcagcctgcccgggcagctccgcttgctggcatcgtctggggctttgccatagccgaatctttgatgtcctcctacctcgggactggtcatccatgccagggagaggagtcccaaaccttctcaccttctacagaaaaccgtcaaggaagtactgcgctccccgtaactctcgtgcttcaagctctcggaactgttgctgtggctctgggggccttgggagttgcctacttcatggctgaatccttgtgaattggaccccaggcccaccgtccggcaggggttcatggcatggcaccccaactatgccactctgcgtaaggattattctaagaagaaagtcattgagaaactgaagctcgtctctgccctctctgatctacctgagaacagcataatctctgctattacaatgaggtgacgccatcccgggaagggtgaacagtcttgtccctgaagacagcacacaggaaaaccatcccacacaaagtctgccttgtctccatatcggtgtccttccacagtcagccaccattcacattcaaacctcttatagcttccctacaaaattcttgctgtttatggggatgtctgtacatcttttgtgtcatttgctctgtgcacaggcactgcctcattaataacttgtttttctcttgct

SEQ ID NO: 47 - protein, 237 aa, Mus musculus
PSAHGPPSGSPDPNGCRDIPTGETAYLGREPGNSQLHVAPRCRRITMKKVKKKKSDSRRRRNSISPQTSSDSSQQPSSETPPSCPEPDPSKPQPCQESTTPHQVNPEPKPQQHTPQPLPPPEKPASSPFLVPMEPKPILPSRKAAVPLTYVAPRSCSCAACPGSSACWHRLGLCHSRIFDVLLPRDWSSMPGRGVPNLLTFYRKPSRKYCAPRNSRASSSRNCCCGSGGLGSCLLHG

SEQ ID NO: 48 - DNA, 48208 bp, Homo sapiens
agcaggacccgcccacctggtgaggtaatttgctttactcagcactcatccactgattcagatgttactcttatcaaaaaatactttcccagatacatctagaataatggctgatcaaatatctgggtaccgtggtccagccaaattgatgcataaaattatcctcccacttccccacccctggcccctccaaggccctccggggttctccgggagtctggctctccatctcctcctctttgccctccggcttccaggctgtgcgaccctgaggctcttccctgccctgttctacccaaaggggcctcaggggcttgaattcctccttcttggacctttttctctttccagtcagtggatcccatcactttgagggctcctggaatgacattttccccaagaagcctctcctgtataaaactgggggttgttggctgtgcccagaggatgggggtggcttccctgccctcttcaccccccacacccctgcccccttccccctgcatcactgccgggctggactgggggtgggggttgggggaatataagccctggattgggcgcccttatcttgctttaatttcctctagagctcagcgccatgtgaggttatagtagtggccgaccttgtttactctttcctaccggagtataagctccagggggcagggacttcatccccagagcctagcccaggacctgcacacggaggcactcagggtgtttgttgattgaatgaaaaacgttcactgaacacctctgttgtgccgcacacactgtgccagggcgtggacgaaagctcagctgcccaggccattgactatttctgagcatttccactctcacgttgtacacccctcatttctctcttcctggaggggctccctacctgagcgcgggaatcatcttccttcctctctcctggagtctgcctgacttggtgtcccaagacagggactgggtcccctttgagcccctggaggaatgtgaactgagccgatgaggagatgcctcctgtctacttggaggaaagggaccgggacacacagaggcgcagggggctgaaccctcggttccagccccgataactcatccggagtcacgcggttccgggactttgcagaggaaaggggcgcgggatgtgctttgggaatagaattccacctttgcactcggctctgcacctgtcctgccccccggagattccttgagtccacgtggatccgagaggagaagctgttgatcatttcctgtccgctgaggctgtgatccccggccgaccggaccggtagcccggcagcgccctctggtggccggtgacgctcagccagcgccgggaatcgccgcccaggccccaaggaccagaatcaggagcaggatcagggccagggccagcgcgggaggcagatttatcccggtgcacacctctaacttatccctcctacacaaggcaggactccggcttctttcccttttctgtgtatttcaaaaggaatgcacattgagcataaaaaatatatgtaaacaaaaagaagctcccagtcaaagctgtgatactgtgtcctggcaggaccagccaggcctgggtctcaatcccagacctgccatctaccagctgactgaatctgaacaagacgcttaactctccgagccacagtttctgcatctgcagcctgggaatggtgtgctctccattgctgggttgtgtatagatgacctatgtacccagcacctaggacagccccgactgatgggggcaattcttattagacacaaaggagaatctgttaaatgtccttcagtttctgctcaggtgttcccagggggtgagagatgttcccaaagatataactgcctgcctgatcgcccaagcagagactgtatttcccagattttctggcagccagagttggtcacagggctaattctggtccatggaatgtggctggaaatgatgtgtccaacttccgagtcacgccctgcaaaggaggttgtttcccctccattctgcttttccatcctcctgctggcttggaagtggacggtcctggatcagctgccctggagaaaggaaaggaagccacatattgaggatggcagagccttcctgacaccccagaaccactgacatctgcagaaataaatattcctaacccaacgtatctctggatctctttgttacaccaacttagatataatcgtggtgtttcaagtgcatgcccaggagtcttggtattcattctgaacaccagctgacagagcttctgcctttagtgccacttcttacctttagtgtctccccccaccccaccatgcacaaaaaaaagcccctgcaagggctggacccagggaaccctagggatggcttaactccagcctggtcatcccctccctgaggtcacactgaggctggcagccctgccatctggatcatcccctccctgaggtcgcactgagactggtagtcccaccacctctctctgctcctctccccgttccatggcttcagtgtgccaggggctgattaaaggtagtccaacgtgtcagacagttagtacaagggttcttcaatgactgtccaactgcaggttgaactgacaatgaacaagacagcacactagggctcctttaccccagtcaggagggacagagtagctcaaatccatgttttgggagtctggaacctctattccttcctggtactccccagtttaggatatgttgataaaagctggtttagagaaggcaaaaagcaagccccagccccaggtagggcctcctacctcccctagtaatctcaatcttgagactcccacactagggtaaacctgtggaaaggccaattcctgtatggtgaagttgtcaggtttaatttatcttggaagaaagtttagcccccccccttccttttttttttttttttttttttttttttttttttttttttttttttagaccaagtctgcccaggctggagtggcaggcatctgtagtcccagctacttgggaggctgaggcaggaggatcacttgaacctggggggtggagctcacagtgtgccaagatcacgccactgcactccagcagacttgtttagtctgtttttgagacttaggcttgctctgtcgcccaggctgtagtgctgtggtgtgatcttggctcactgcaacctctgcctctccaggtcaagcaattctcctgcctccgcctcgggaatggctaggactacaggcacaccaccaggctcgagtaatttttgtatttttagtagagatgggggtctcactatattgcttaagactggtcttgaactcctggcctcaagcaatcctcccacctctgcttcccaaattgctgggcttataggcatgagccaccgcgcccgaggatcctggagtttttagcgggattctagctcagagttttctgtttgacaccctgcttttcagagttttttatgtttatatttttaaaaataatttagcataacttggtaaagctcattttaagaaaaataacaaagggaacaactttccccaccgttgggtttccagtctctgtgaccgtccttgttccctccgtactgcctcatcatgacactctgctcaccccgcgtgctgggcagcaaacgagttctatgctttctgtcttgttttcctgaggacctttcctggcgttttgacaggccgctggtacccacagaagcctggaactgagggggcccaaaatcatctcgggcaacaccacccgtttatatcgtaatagcgcaagactccggcgcccgaatcacccagagagccgactggccgagccggggcccagccacccaggccgccactcttcgctgattctcaagagttgcgggtgcaatgagatctggtccactgctttttaaatgccccgggtgcataaaaattcgccttacttagagccttggggacgaagatttatccatggtataaaaggatgcaccttttgaaaccacaaaagtagaaaatggagaaactgaacacagtcggcgttataccagcgtccaacagcaacttcctatatattagatttccaaggaatagcggggcggaggtgcttggccacgacaggaaaaggtagggctcaggggtattgtgacatgctccggagaagggcagcttttccctcccaacggaagcccgagcccagaggggcgagggtgtcgggccggacatggagcagcggcctggggcccagccctgcagggcaccccaggagaggaaggcggaggcgcagccacaggccccggcccagtctgtcgagggccacggccaggtgctgctgatcagcgggctctggaagcaggatgaggacggcctgagcctgcagagctttccaggagacactgcagccgatcagctccccaggccctcgtccgcccgagccatgagcggccacaccagcgccagcaactgcaccgcacggcggtccaagcgctggggcgacagctccatgaactgcgacgactgcccggccacgaagtccaagcgcttcaccaagaagtcgcggcgctcggagcccaaggccgaggacccgcgcgaggcgccaggggctcctcctgggacccccacctccgcggcagaggacacagcgtctgcacgcggggcaccgcagcacccgcctgagcggggcgcgcagctgctcctggtgttgtgccgcgcgtctgcgctcctcacgcagctgctgcggctgcagctgctcctgcaacagcagcacgcccgggaccgacgtccgcccgccgcgctcgtggggatcgtggtgcagccgcagcaggaggaggaggccgaggcgcgccgccgcatggaggccctgctcagccgagtcctcgcgccgcacagcccagccgtggaggtgcacacggccgtgttctgccccggccgccccgagggcaccctggacttccaagcgcgccgccagcaagtgcacagggtctccctgatggatcgggagacgcagaccgatggtgaggggtcggcgcggggaggggggagccccggggcggagaacgctcaaacacgcagccctggaccccgaccctgccgccccgcggggtagaggacaaagccccggagtcacggcctctctcctggcgcctccaggagttttgggtactgttttgggtggtaaggaactagagttcctcccggtgtgctcactggggcaatctcagcgtcagaggtgttcgaattaattcggagggctacgacccccactcactggccccacatgcaacttggggcatcggttcccatgacttggggtcacgcttttgtaaggtattgatttgggactttgtagaaacggggccccactccctcctctccacatcctcctctcccttgcttgcttctttagtcttctccagggaagaataataacactaaaagcacgccttttgtgagtcaggcgctgttctaagggcttttcacctggatcctcatggcaaccctctcaggtggaactccgctagactagctggccgacttcaggattctccttcgcaactcttgagaccctttctgttatggagaccaggcctgtggcccacgggattaatttgtcagtctaaggtccctgggcagtgagatcttgagggagcgccaagtcccgcaacctacctgccagctccaccctgccaggggcagcaggagggactgaggaagtgctctgtgtggcagagtccaaaggtcaggtacccaaggtctgccactctccagctggtgaccagagcaggcatcctctctatggaccagtgtccctcctgtgtgacgtgaaggtgaagggctggttgatgtccagggtgccatccagctcagagaagtcagcttcaggacaaatggtgacacacttattctaggtgcccaggaaaccagaaccatcagagaccttctgggaggaaattttcaccccatcaagaccttattctgactatctaatttccaattcccttcccctacctagtctactgcattttcacatgactggcatccctagttaggaaactcccttgcccatggactagtccagctgtgatcctcagccaaggccagagaagtcccagtccatttttgaaaacacccccttggtgatgaagccttggaggtgcctgatcccacatgcccacctgcccccatcacagcttcctgctgtcgcagcttcctgctttctctgtcctaactttacctttattcagttccagcagcttgcattaagcccctactctggactgtggccttctgaggtttccaccatctggggttggggaatgagagggaaggcagagacagaaataattctaatgccgttcagaatatgaccagtctcatacaaagaggtgccccggagctcagcagcaagggaaggatggcttccagttggagatctcaagaaaggctttttttttttttttttttttttgagatggagtctcgctctgtggcccaggcttggagtgcagtggcgcgatctccgctcactgcaacctccacttcccgggtttcaagcaattctcctgccttagcctcctgagtagctgggaccacaggcgtgtgccaccatgcccagctgatttttttatatttttagtagagacaggattttgccatgttggccaggctggtctcaaactcctgacctcaggtgatccgcccgcctcagcctctcaaagtgctgggattacaggcatgagccactgtgcccagcttagaaaggctttatgaagagatttatccacttgagatagggcttgaccagaaaatgctttggtagaggtgcagagagggatgatagaggagaagggcttctgaaaatgcaggaatgttcagcctgttcatgagatctctgatgttcacggttagctagagctggacacaggtagtagtagtggctgataagcactgggcagtgggctgtggctgtattatggaagagccaggcttcctgtataggaacaggtgctcaaacagaaagcagtggggccaggcgcagtggctcatgcctgtaatcccaacacttacggaggccaaggcaggcagatcacttgaggtcaggagttcgagaccagcctggccaacagagtgaaaccctgtctccactaaaactataaaaattagtcaggcatggcggcgcatgtctgtaatctactcaggagcctggagcatgcctgtaagctactcgggaggctgaggcaggagaatcagttgaacccgggaggtggaggttgcagtgagccaaaattgggccactgcactcctggagacagagtgagactctgaaaacaaaaacaaaaagaagaagaagaagaaggtgggggctgcagggaagacgttctagcaaggagctattgagggaccattcttcctcattcttctgggacaacctctttccacaggtgccctctctctgcttcttgggaccactcttactaaagaattcacacatatttttgctgctgccacagagaaattccccactcctccctcggcctgccctctgtgcttcctccatctttctacaggaagacagagactcattctctgtgccctgtttggctccttctggtaaaatggaatatttctttcattgctaccaggaagttctacctatatgtgtctgctcctatctgattcatttacaccaacatggcacaatcaggggcaatgtggacacacacactcctaccccatctctaggggacatttagcaatatctggagacattttgggttgtcctggggtaggggggagtaaagactgggtaaagaccagggatctggtaaacttcctacaatacacaggatgacccgccacaacaaagaattactcagcccaaaaatgtcaacagggctgaggttgaaaaacactgatttaaaccaggttgaggccctcggccgaagcccattggtacctgaaaatccaactttgcagagattaatgccttaggagttcctgagctgtctgctagatctcaacagggttcccggcctcggtttccagtctctctgattctaaatggagtcccctcaagggttccattgctcttggcttcaggaaattaccagcttcatacagattcacttgctcccagagcctccttaggccaaggtcaaccaaacacaacccaatactcttgagctgagcttgccttcacttctgatccttcctgcctttgttttcttcaatcttctcgctcagggaccttttttttttttttgagacgagtctcactctgtcgtcaggctggagtgcagtggcacaatctcggctcaccacaacctccgcctcacaggttcaagtgattctcctgcctcagcctcctgagtacctgggactacaggcgtgcaccaccatgcccagctaatttttgtatttttagtagagacaggttttcaccatgttggttggccaggatggtctcaatctcttgacctcatgatctgcccgcctcagcctcccaaagtgctgggattataggcgtgagccaccgcaccaggccactgggggactttttaattcattatttcaaagcctgtataattatctgactccctattgttttctgggatcatgaaaataatgagccccaaactggaatttagtccttccgatgcccccagccagctgtgtgaccctgggaaagtaacttaatttcgctaaacctcagtgttctgaggaaaggtcatcattaaggtatttttaggctctagaagccctaaactatgtcctgtcatttcagagttcatgttgggtctggctttgtgtggcccaaagccccccatttttttttaagacagagtctcgctctgtcgcccaggctggagtgcagtggcacgatctcggctcactgaaagctccacctccaaggttcacgccattctcctgccgagtagctgggactacaggcacccaccaccacgcccggctaattttttgtatttttagtagagacggggtttcaccatgtcagccaggatggtctcaatctcctgacctcgtgatctgcccgcctcagcctcccaaagtgctgggattacaggcgtgaccgaagccctttttatctgcataggtctgctctaaaccttccgctggggcaggagctcctgcgcttgccagtcccacactcacccacctgtgacacactggcgatgaaagcagtctcctcaggtgaacacattttatgttgcagtcacagtatgagcttcagattgtcttttaaaaatacttttccttcttccatcctaaaacaaaaatcacatttaatgagcacattaaattaattaatctagagaaagattcagtcacctgtttaacccaaccaattggggtttgggagatagtctgtggttgccattgccatgagtttgagacaaatgttagttttctgaacagctgttatgttctcagggaaaattatctgccaaatgcaaaggttcttataaaagtcaagtcaacccccaaactcccctcccacagtgcgggagggcaggctttgggggaaggggtaagctactctgagatggtagcaggctctgggccatggtaaagccttcgaagaagctccaaatcttcaggaagctgacctgaagatgaatgcgtggggaacatggatttttgaggtgtaggagtagggggtatgtggaagccagtgacagagctgagcgtcacatccagggtatcttagagcaaaacaggtagctcacatggacccaggaacacgccagcagagaggtgtctgaaggcagcgctcaggtcgcagaagcatgaggatctggctgtcaccagccccgtagccagggctgtgaggaccagggcagccgctgtcccctgcctagcctggcagcctgggatgaaggaggacaccaggctggtgtctgcagagaagactgtcccttgaagccctgccataggagccaccctggcttttatgacctcacaggaggtgtgggtcactgttctctgtggggcctgggtccagctggaggcccgagccaggctcctagggcagagggcaaacggcccctccaggagggagccgggagattacgcagctccatgtaggtccacgtttaggttgggaggatctaccatgaagaaggtcaagaagaaaaggtcagaggccagacgccaccgagactccacctcccagcatgctagctccaattccacctctcagcagcctagtcctgaatccacaccacagcagcctagccctgaatccacaccacagcattccagccttgaaaccacctcccggcagccagcattccaagcccttccagcacccgaaatccgccgctcctcttgctgccttttatctccagatgctaacgtgaaggcagcccctcaatccaggaaagcaggtgggctgtcttctagcttcagcagttccagccttcctgctgatggagttctgggtcatcccaaaggctggttcttgtaggatagtgatgcatggttaacgtgtatcctggagctgtgctgtagagtgggaaggtttttgtttttgtttctacccaagagaccaggattcctgggttttgtcatttctcatcatcctgagtctcactgaagacagccacacatacatataaacatttaacttggttccatagtaatacttgctcactaggaatcagcagtgccatgcaactgctaaaaaataaaaaccaaggatgcatttatagaagtatatggtttagaataagggaggtgatgatactgctttattctgtcctcatcaagctatccttttgggctgtaaaagatgcctgacaaactagtccaaggaagatagtctgggttgatggaggatgagaaggatcagggagaccatttagtgtatgacagtcaattgaaggaattggaggatgtctgtctgtcaagtggaagatgtgaatagacttgttccttattgtcctcagagatctaagggtctgatgtggtttggctgtgtccccacccaaatctcttcttgaattcccaggtgttgtaggaaggacccagtgggaagtgattgaatcacgggggagggtcttttccgtggtgttctcgtgatagtgaataagtttcatgagatctaatggttttaaaaaagggagtttccctgcacaaactctcttctcttgtctgccgccatgtgagatgtgcctttcaccttccaccatgattgtgaggcctccccagccacgtggaactgtaagttccacaaacctctttcttttgtaaattgcctagtctcagatatgtctttatcagcagtgtgaaaacagacaaatacaggcccatggataggatagccagacaaaatacaagactctcagttaaattttaattttagtaaacaacaaataatatttttagtatgtgtgtccccagtattgcatgggcatcctatatttttatttgctaaattagcaatcttacccatggaagacattagtgacagaaagccttcggctcaacataaaaaacttcccaacaattagctctgtctgaaaatggaatggctgtcaggaaaagtggttccctgtcttcttgggagccaaacagtgtctgtataagcattggattgtgtagagggaattcaagtggagttcaggaggtgggctggtttatactactaacaataatggtgatagcaaactaacattatcactaagcatttactgtgtacctagcattcagatcaggtgtcttaattttcacacgtgataatcctataaaagttcttccatattatctccattttatagatggggaaactgaggctcataggagtcaaacaggttgctcctgagcagacgctggtagccctgagaagggaaacccactctattctgactccagaaccctcactttaaaccacagcactgacctttccattccaagaggcctaggagtctccacaagaggaagaacatctctgtccgagcatctcctggatctgccatgagccagtgcccacgactccatagccttgaacaggccacactccctgggccacagtttaccccccgggattgtgtgggcataaaataaataagtgatggagatgagagtgctaaatataaggcatgccatgccaatgatccttccatggccaggaatcaaacctttcttgacatatgatattgattttgagcaccatactatatgttgtaaagattgtgatcatcagccagtgagagaaacatttctgggttatgatcttcagaactggcatcttcagtactggtagaaagcaagactttccattcccaagtcttttaatgaacacatgtgactcatactcagagaagaatttggcccattgaacaggcaaagcaagaaagcaagaaatggtggtggctcgccagtggttacagcagacaccctatacttcttccaaaggaattctctgcgtagaaaggaatgttggagatgaaggatgagggcctgcaagtaaagcgtgccattttctaaaatccaagcctttttgtgtgcagaaatattgtagctcaagaaaatgccagtcttccactaggatgggtataatcagaaggatggacaataacaagtgttggtgaggatgtagagaagctggaatcctcatacactgtaggcgggaatgtaaaatggtgcagctgctgtggaaacagtctggtggttcctcagaggaacatgaagttaccttatgacccagcaattccacttctcagtatacatccaagagaattcgaagcatcttattaagcatattagaagcacaccaaaacttgtacacaaatgctcaaagcagcagcatttgtaatagccaaaaagtgggaacaacccaaatgtccatcagctgatgaatggataaacaaaatgtggtatgaaataccacagtacaatgagtatggtgaaatactatttggcaataaaaagagatagtgtcctgatacatggtacagcctggatgaaccttatagacacttggctaagtgaaagaatccagtctcccagaaacccacacatcgaatgattctatttacatgaaatgttcagaataggcaaatgtattgccagggactgggggaaatgggagagtggggagtaactgctcatggagatggggtttctttttggggaaatgaagacgttctgaaattagtggtgatggccacaaaactttgtgaatatactaaaaaccactgagcactctaaaagggtgaattttattgcctgggaatgatatctcaatttaaaaacttttttgtaattaaaaaaaaagacaagtcttgcctttagaatcccctctcctcattccgggaaagtacgtgtcgtgggcaagtctaagcagaaagtgtattgaatctgccaggttgaccacctgtttcatgcagcttagggtcagaagaatctgtagctctgtcaagaagacgcagggctacagataggaaacaggagggaataatccagccagaaattatcttgcccaaccacagagggcatcatctacattctgctgggatccataccagaggaggacagaaacagaaaataggatcgggactggaaactagagctgtggttgtcttctggatggatcagaatgctctagatcaatggaacgtggcagctccaattccaggaatgtcagtgcagcctctcctgaggtgagcagtcacctgaaattccattttcactgaattaaacgtgagaaagcctgagttgagaaagccaacttctgtaatctactccccaaaagggcatatcccttaaattagctgagcctcagtttccttatttgtaaaacaagaccagcagtatcccctttacaggattactgtgaaattaaatgagatgagcatgctaagtgcaaagcatcctgaaggtgtaagccatggcaccatcagcaccacctccatcatcatcatcgttgttgtcgtcgctgttgctactcccaggtagcaccagtataaaacagccattttcccatgcggtcagtcttctcttctgtttggttagagaacattttgtgggagaactgccttccttaggtagttcagtcccaaatcctcaatgatgccttggaaaaaatccagcgttcgccctggtaatcctgcagctgctgccgttgtggggggccttctcagactgtgttccagactcccccgccccagcctcccagggcaggtgcctccctcacctctctccttctgtccccacagggcctctgattcgcgccggcccgcattcctgctcctgtgccacttgcccctgcagctccgcttgctggcgtcgtctggggctatgccatagccgcatcttcgatgtccttctgcctcgggactggcagatggcgccagggagaggactccccaacctgctcaccttctacaggttccaagcgcgaggggctggagcctcggggcacacagtccccagggccaggctctgcccccagaccttattagcaatcatgtatcacttcctcttgggaatcccaggccgaaggaaagcctttctttccctctttgctttgcccacttcctggacgttggcaggcagggccctttctgaccggccccacccccggggtacccaccccgcctgtacagagaggtgccagttttcttcctcactgggattcctcctcaggggcttcctttttcttttctccagagatgccctcccctcctcagaacactctccccctcagcccttcacagagtcgctcaggagctttgtgtttaaacactgtttggccatgcacctccgtgggccctcagtggcctgtgtcataggcaggggccttaggttcctgatctgcctacgaatgtcgcccagaatttaatgataaaaaactacttgtaactcatatgcctcctccacacaatagcaagacgtcagcccccttcagactgtgctgggctctttctgggggtctccacagggaacatctgcccccaggctggtctgttggtggcggcccccatgacatcacccatagtatctgtccttccttcctcttcccaaaaagccaccaggagcagtgtcatggctgccaccgccctcataggaagaccccatccatgcagggaacagactggagatgttcccacgtttgggcgctgctaggttacatgcatgggctgggagaggggtcgccatctgccccacctgagggcctcacagatctcaatggaagaggcccttccacttggcgacctcacacccccaccccaggaactgaggccccccaacccccatccttgtcctgttcctcttcccagcctcttccctacccaatcccctctcctttctggagctgaaaaactccatctctcctacacatggagataagtaaatagataccggggcgtgtggggagaacacgcttggagccaaaaatactccaccacccagtaagctccgtcaaggaaaggtctgcctgccaccgttagccacaccctgcccacacgcttagtacttccatccatccatggccaaatcgtgccatgggttcatatcgttttaaaaccagcaagtgttattgagggaaacttactatgcagaggacatggggcactgtgagggaaaccagaacagggaactttacccctaaaattgttgcagtcgacatggagagctaagacccatgcatttagaaaccaagatgcaagatgcaaagagccttgtgtcctctaggagaggctccaacaggaacctctgaaaggttccaacaggaacaggctccaacaggaacctctgaaaggttcctgtcaacagcatgtgagccgagtccagaaggatcttgaagtcctctctggcttaagatgaaaagcgggagcaatctgggtgcaggaaaaggcaagcgtgaggctcagaatcaggaaagtgagcagggagagacagggtccatatctggccagggcaagacatgtagttttaattctgctccaattttagcactggcatgcttttctcaatggagtgtaatgttggctcttggctttcaatccacattcacattaaacaagaatccctatttttgtaggatttttatcaaaacgggtattgcattttttgaatgccctcctcacaattattgccttagtcatgttttccttgcctttgtgtgggtgtaatatattatttcccaagttcctttctctcaatggagtgaagtgatagaacttacctcatagggttgttgtgaggctggaagaagacactgggtgtgaggtatttagcacaaggcctggctcacagcagacttgaccaccttcctaacctggtccccttctgagtgttcagggcagctagcatcccaggccagctcaccctccgatcctcaggggtctttcagtagggacttgttggaaggatgggaagaattaaatgctctcctaagaggagtttggagagggggaagatgggtattcctgcaatcctgagggggccacataatttccactttctcctgttcgtagagaggcactgaagcccagcttcccaccacccccacttctgctttgctctacagaaaatcttcaagaaaaccctccagtcatcgtaacgcgtgtcctccaagccctcggaactgtggctgtggctctgggggctctaggagctgcctactacatcactgaatccttgtgaacaagcccctaggcccacagtctggcaggtatgttgagcgctctgtcccttcgaatggaggtggtctcttcaggtggaccaagccccggcctctcaagggaagcttgccagtggagtgactccctcctggcctcagggtcagccggcatggccctctagggaagacctgatgctctcagatgacgctagactcattattacaatcatctaaacagagcccccacctcctctgccccgggatggtgtccctggtcatggaccctggacaagaggaaatgggagggatgggggcaaaggtttctacccatctcggacctttcttggaactttctccctgcctggaaagcttgtctcctacccagtcctaccagtccatcacccataaagcccccttcttccatgaaacctttctccatcttcccaacttcaatgacgtcttccatcttctcaacccctgtcctctccacctgtgcctcctgtgttgtggatgatcctgtcgtttgcctgtggcctgtctcccatctgtcctgcaagacccctgagggcaaggggcatggctcatgcagccatcttccctcatccctggaagcagagcctgagactggggttgaatggacaggtttattgaggaggtgctctcagggagtgagggagtgagggaggcaagaagaggcaagggaaggagctgagaggcaggaggccagacctcagcttgaccctgtgggagccctggaacaagaatgatgacacagagttagtctcagcagaggggagagacttgccctctggtgctcctccttgtcagtgctttggctctgagtgttgggtagggactgcatgtctttgtggaaagagcagctccctttgggctgagggtgcttccctagaggaggggcagctctgagctattagcagcacattcacaactcacaggagttgggcagtggatgcaccagcccaaaaaggggataatcgtctgttttccttgcctttgcagtgggcgtaatatattatttcccaaggttcctctctcccagtggagtgaaatgatagaacctaccttgtagggttattgtgaggcttgaagaagacattgggtgtgaggtgtgaaggtctgggtggggtgccaagaactgccacgatgatccccttgccatgtccacacttagcaaatgcttaataagtgacagtggggatgatagcatggggataatgagaaacatttcaacccacttccagacctccaccagccccaggagttgataggtgatggcgctgggagaagatgttcagaatatctcaaaagccaagtccagaaggtaaactccagggagagctcactatcccctcatgtgctctgtgataccatgtcccatgtctgtggcagaggacatagtagttccttagctgctatgctatttcctgaggcgtttcctgagtggcaagaacctcagtttcctcatctgtaaatagggaaaatgacagtaccttcctcttgagcctgttgggagaggtgagataaggtgttagaggacagagctcactgctggggggtcccgttgctgttgtcaacatggaggtggtgggaaggatgccagctttggagttagagctgccggctcctttcttgactctgctgcctgatagctgggtgttagagacacgtttcttaatttctctgacagtgacatgtctagtggggacaataataactacctccacaggcaatggttttgaggattgactgaggggatgtgtggaagtgctgagcacaggacccagtgtcagggatgggtggatgctggccactggcaacatgacaaatgcacccgagttaaagcattttctcttcaaaattccttgcagcagaacctactggttgtgagctggagttctggaggcaggcaggcttgaggtcagaggcctcttcaatacccagtatttctgaggcctggggcaggttccctaactcctgatgtctcattttcttttcgttaaatggagataatcatagcacagatctcattggattgttgggggcattgagtggaaaaaatgcatgtaaaacacttagcacagttcctggcacaggataagcactcaacatagctacatcaccactactaccaccactgtcagcaccatcaccatcaccatcaccatcaccaccaccacctacctctatcaccaggccctgcacctggcaattctgcacatcccttcaattaatctttacaaccatcacccttggaggtagttgtcatcaacaccattatcatcatcatgataatcattaccatttgttaaatcagtgttcccctaattttactgacttttgatacctgtaaaatcacttaatatttttctttaaatttgcttactttttggctgggaatagtggctcaaacctgtaatcctagacctttgggaggcccaggcagggggataacttgagcctgggagtttgagaccagcctgggtaacataccaagaccttgtctctacaaaaaaaaaaaaaaagagaaagaagaagaaaaaaagattaaaaaattagccaggcatggtcgtacacacctgtaatcccagctatttgggaggctgaggtggaaggattgcatgagctcagcagttggaggttgcaatgagctataattgcaccactgcactccagcctgggtgacagaactcatgagaccctgtctcaagaaaaaaaaaaaaaaaaaggccgggtgtggtggctcacgcctgtaatcccagcagtttggaaggccgaggcaggcagatcacaaggtcaggagatcaagaccatcctggccaacacggtgaaaccccgtctctactaaaaatacaaaaaaaaatagccgggcgtggtggcgggcacctgtagtcccagctactcgggaggctgaggcaggagaatggtgtgcacccaagaggtggaggttgcagtgagccgagatcgcaccattgcactccagcctgggcaacaacagcgaaactctgtctcaaaaaaaaaaaagaaagaaagaaaaagaaaagaaaattagcttactttttaactggccagggaagaactttagccaatgaaagctgcccgggcacctgtatgagagtcactgtaggggagggcgatggaggtgcatcgtgggggtacattaagtcgtgctgatcttgtaggctcagctcttaatcaacaggcagtttgatgtccttccctgtccagagagtgaagaaccatctgacgacagtgacatctttcctttttggggaaagatgcttctagaattttctttcctaaagtttggtgaacctctcccttggcatcttcctcagctgaaggtgaggccctaaaagcaaaggacttctttcccagccattttgggcgttgaatgtggtcaaaccactgcagtgtagcttttggggagtgagactccatcatagctgcaggggcccccggggaaggcgctggcaccgatgagctgagcaggagccaagcctggccaggcgcctggcaaaaggcattacagcctgaggtgtgtggctgaaagaaggagtgggtgcaaggaatggaagaaatttgaatcctaaataatttatttctccacggaaggatcacagctgctgaagcctcacctgtgaggctgtgaaactggaaagccaccaggattccaggtcacacggggtattgtctaagctgattggctctgtccttgtttttcttacagatccagtttccatcaaagggacctctcttgtcaccaaaatttaaaaaaagaaaaaaaaaacgagttctgtttctttagcatgttttacttagagacataaaagttggacttggcaaatgactaggaagggaggtctgggggccccagtgaccttttgggccacaggtcaagcagaactggtgcctgtcattcctgttcagggccacagacccccggtggagcagctttctctgcacacactcacagaacacagtgtttgctttagattttctcactctaaaggaagggattataaagcttaactcaatagctaacgtagttagtcatctgcacctctgtcccagggtaatcccagttactgggaataggaggaatgtgccggttcgcctccaggcctgcaccccagaggacagaggccctgtgcccaggaacactgtctctagaaacagcttcttttagggtcacctgtgatggggagcagcctgccatgcagccttgtgtttagtgctagtgatgtggctacacccagccagtgcctggtgcgattctacctctagctcctgaacaggcgactcgaaatcttagttcaaggtgatcccagcaaacaccaataggggagaggagtgtcaacgagggaaggaggctgggcctggtggctcatgcctataattccaagactttgggaggccaagacaggaggatggcttaagcccaggaggtcaaggctgcagtgagctatgattgcaccgctgcactccagcctggacgacatagcaagaccctgtctcaaaaaataaaaataaaaaaaaggaaccaccaaagaagggaggacagccagtactagtgagtcctaatgcagtggccattgagggcagctgaagcctgatcctgctggggcgtcgtgggatgggagaatggagaacacacaccacacagcatagtcatcccacctgacagggagctgaggcatttgtaacctgttggtcttggagaaaggctgcgaggagggaggtggttaattcctccacacttttgtccccttctggagaggaagcccccaggcaaagaagtgcagatgcgaggtttaggagtcagcccgcatgcactggaacggtgacagcggcatatggtgtaggggtggagggaggacaatgctgaatgcctgtgaggcatccacagacccatgcccaggtgacctcctatgactctaagaattagttagaccgggacccagcagggcagccactgggaaggcagggagctggtttacccacaacagcactggtgggattgggcaggatgggccaggctggagcccattccccacccctcagtcccaagatttcctttctgaaacaggtgtgggagttgcgtggggtcgtgttgtggtcctgtcctgcaggtcacaatgaagggacctatagacatggtggaagggactggggactccatggctgcagcttctggactgaagacacttcctttttctggcatattgaggtccccctttgttgtaaatgttggacaacctaacccaaactaggcttcagcaaaatgacaatgtattagctcctataaaagtcaggagagagttctggttcagatgtggcttgctccaggggcacaggccatttccctctctctgtagcagagttagttccattctagctacagcagcaacagctcccagcctacagagatcaagtctagcagagagggtgagccggcctgtctccccacagcaaacggcatcacagctctgactaggtcctgtgtccctcctggtacccatcactgtgcccaggaaaatgcagggggctgattggccaggctggagctgcacagcctcctttggaacatgaggataaaatccacagaaacagtgagcactgagcagggaagaaaatgattctccaactgcagtgtgggtaacctgttaccaaaagagatgggaatggacgctgggcagctaaaaacagcacatgctccctccagttggctgtgggtctgcatccaggacctgtgctctccctctgcttctccccgttttcctccaccaccaccacctcaccagaatgaatgctcaagtggccaggagagagaactcccagctgcctcaagcggcagacttgcagcagatcctggcagttggatcccccgggcagtggtgaaaactagccttccatccccggggaaatgtgtggggcgctgctggttgtcacagtgacggggggatgctgtgggctgttagtagtgaaggccaagaatgcaatgcacaagacagaccacacaataaagaaccatcccaccaaaaccccaagagcatcctcccggacagtcactgtcacctgggctcatctctcccacactggccttgcattgtggctcacgttgcctgtcgtgggccatagggatccctcttgaagagtggaaactgcacatgctaaacgaccacatgccggagtccctgtcttcatcctgccgagtgcagttctgttgacacatccgctactctgtggttaggtcctggaggcagagagcaggttttttcttctcaaatccttcccagcacattgcagactcatgaatgagtagacctgtcaccctcgggagcactttgggatacattaagatttggcttaggccattgtattcagagtgtggtataatgagtgagtgtgatattcagagtgagtataaatgtgatcactggagaggactattttaagtacagtcaatttcaagcaacagcccctgataggggctttcaagagggaagtttagagctggaaagaagagtgagcaggtatatttcctatcaatcaccatgcaataactaagactgctgtggctgtgagtttggggacagcctggctgtagctgagcctgcaagttataggggccaaggccctttgtcctctaaaggttcactgaaaactcatatgaggcaaattgattaataggagaaaggcatacacatttatgtgtacacatgggagccttcagaatgaagacccagaggtacagaggaaattgtcttcatgctgagtttcaacaaagatggacagccttgtagaaataggactggacaaaagggtcggatctaatgctaatagactatgtggggaacccagcaaggcctgtctgtctagattcttcttggcctctctgagcagcattccttcctctggggcatggggcaagatcttctctggaatgggggtcttatgactgactgcaaacaaggtaggtcagatcattttgttatgaccagttcttacacaaggctgggggaaaattcaagtaatacttttaggttttctgactagctctggggagaatgggttcttgtttctatggcatcttgggaaaggattgagtttgtatggctagccttgggggagatgggactgagagataggagggcaggagaagatcacagaaaactttcccttctgaggccttcattttgaggtattattgtctaagctccagcggagtctagcatcttcaccaggctgagctcagaccctggctctgaacattgtctcaagaccatcaactggcctggtgcagtggctcacgcctgtaatcccagcgttttgggaggccaaggcaggcagatgacttgagcccaggaattggagaccagtctgggcagcatggcgaaaactcatattttgtatttttctaaaaaaaaaaaaaaaaaaatacaaaaattagcacctgtagtcccagctatttgggtggctgaggtgggagggtcacttgagcctgggaggtcaaggctgcagtaagctgagatcgtgccactgcaatccagcctgggtgacaaaaggagaccctgtctcaaaaaaaaaaaaaaaaagaaaagaaaaagaaagccatcaatcaattggttattatgttattattatttatttatttgaggcagtcttgctctgtcgcccaggctcaatcttggctcactgcaacctccacctcccgggttcaagcaattctcctgcctcagcctcccgagtagctgggattacaagcatacgccaccacatctggctaatttttgtatttttagtagagacggggtttcaccattttggccaggctggtctcgaacttctgacttcaagtgatctgcccacctcagcctcccaaagtgctgggagcctccgcacccggtccagttggttattcttgagataggttggtccctgtatagtgatccatcgaagtgcagaagaaagtccaggaagccccatcctcctgcagctgcctgtctggtctgtccagtccactgtgccagggacacaggaccagatgagaggtccttggcttttcagatacaacctggtctccatcctccccacccccacccttgaggacagccaccctcccactggccatgaagcctggcacccaggccatcccgcagtcacagagtaagtaaataaccaggatccagggaaccaaactgccaggtaaaggcagccatgagactcaggggacacctgccatgcagcctgtcctgccaaggccccaggctcagggccatgttggagtcaatcaggcctgcagccaccaatgacccatcagaggaaggagagcacttcaggctgctattacaggctctggcttcactgggaaactcaggaagcctctccatccccaggcagctccccctctgtatgtgcaagcacagcatatacttattacacctcagccagtcacagggggtcgaagcagagatttgaactggaaaagtgcccttgccaatgtcccaagatgcattccggtcctaagccaggaggaactgagctgcgagctagcgaatgaggaggacagaggagctggaggtgcctgtttgttgggagtctggaggaaaggaggtgccaatcaccagcggcaagaaggaaagtgtccaaggcagagagccaggttggtcccagcggcagggctgagcgagagatccaggctcagactcctccaggaggggcctcgaggttgagaatttaaaaagaagagttctgttcaggtctgcgggtgtctgatctcatctgaggagtgcatcaaggagatgaatggagaagcccacttgtctcccattggggtcaggatgaagggtctgggctgaccagctccagaagaagctcacctttcgagaatgagttctcctttaaacctttctcctcctctgttctgcccttctcctgcctgccactgccagcagtcaagaatggactgtgtataccatattctggagaatctgattataccctggacactggtgtgtggattgcagtctgctgcaggatgacattagagtttagttgtttttttctaatggggctccattctgtgtgtctggtaggaggtgcttttaatatgctgataaaccaacctcaggaaggtattatgtacagaagattcccaaggctgctgttgctgaaagagacttgggctactgccggggaactaggtgagtccccgtagctgaacagagctgcctaagagaagtggaatagaggatcatgtggtgcctgttttgtgcctttagtgatcggtgtttcatatgtatttggggatgttgctttctctgtgggaacaagcaaaagaatcgttttgttctgatgaaattaacaatgaatttggtgaaagaaacttccaactcccttgcccatctcccttcatcccattcatttggcaaaaccacaaccctggggcaaatccagttctctgcctcctgcgcacttggacttgtgcagctaaactttgggaagctcagccgtgcaggccagactcgcttgaaattcatgaccatgggctccaagtgggccttgatgctgccagggatcaaatcacattttattccccaagacgcttctcttctgtcctcagacttaccccttctcctccctgcttcaccagacctccaagactcaccaccgagtctccccacctaccagcgccctcttgagtatccatcccccttcccccaaggcaatgactgatttgattgctgtcacgacagacgcatagacacatgattttgcatgttctagaaactaacataaatggactcaatcagtttggactttttttacctggcttcttttgctcatcataatattttaaacctaaatcatatttctatacatatcaatagtttattcctctttatttctgagaagtatttcattgtgtgaatatgccatagcgtgtttatctactcacctgttaatggacattcagattggttccagtttttagatttttttttttttcttttgagaaggagtttcactcctgttgcccaggctggagtgcaatggcacaacctcggctcaccgcaatctccacctcccaggttcaagcgattctcctgcctcagcctcccaagtagctgggattacgggcatgtgccaccatgcctggctaattttgtattttcagtagagacggggcttcaccgtgttggtcagtctggtcttggactcctgacctcagatgatctgcccacctcagtctcgaaggcatgtttttaattgtactggcattttatcttggctaatttgctgtctattttattaacttttttggttagttaatatcagacataaaataaagggtaatttcttttttttttttttttgagggtctcactctgtcacccaggttggagtgcagcaggggcatgatcagctcactgaaggatcatttcttggtctaggctataggctggccttagaatcaactcacctggtgtcctattgtcagggacatcttaaccagggtgactgcacctcgaataaaggccagataaagccaaacttgctgggttacattccttgggggttagacacccttcatcacaagatgtttgtagctcaaagaaggggttaatgatgctaactagagacccagaacgtctgaaaacgtcctgatatttaaagaacaaagcatccttcatttgagaataagtttcactttaaaggtaatagtactctcataaattcttgctgaaatcaatagttacataggaaaataacaatgctaatagcctgtcacaagctgatcataagcctttgtttataaagtctactattcttagccttaacatcccatgtaagcaagtgctatgtttcagttagaggaattcctcctcttgctttctgaggacaccctattctgtaatagagtagtttctaataaactgttttatctttgctatgcactgcgactcaccctctttcccacatgaaatccaagaactcgctcttggggtctggagtaagtctcctttttccagtaacactgtgtgtgttcctggctttgaggggcatcctgggggacggaagctgcccatctggacccctcagctctgcaatcccaggtgcaagattgggacagcaacctggtggcatcgtggggctcctctggtactctgctggtctccatccttccaaaaggacacccaccaagaggctgacacaggccacagtgggagcactgggaggactgtgtgtttgtagagggtgagaatgggggagaggtgttggccaaacacttccatctttctcacagtgacctctcaaggtagccccctggggtaagccaaggaccttcagtgggctcttgtaatgggggtcaaagccttttgtaggtcgggtgttaaggtgcccttccttctcaaggctctctctgcctcttcagagcaaagatgatccagggatgggccaaagggagcaccagcaaaccctacagggagtcccaacttgggagagaggggagcaccaggaaatcctacagggagtcccaactgaggagagagggagcaccagcaaatcctacagggagtcccaactgaggagagagagagcaccagcaaaccctacagagtcccaactgaggagagagggagcaccagcaaaccctacagagtcccaactaaggtgcgaaggatggaaagaaagggagtccacctgagtggctgggactatcagcgcccgccaccacacccagctaactatcgttttggcttttttttttttttttttttttggtagaaacagggtttcaccatgttgaccaggctgatctcgagccacctgccttggcctcccaaagtgctgggatttcaggtgtgagccaccatggcccgccaggacctagtctttggaatgccaacgcagggaattaggggaggtgtgggtggtgaggcatagacagaaatgccccgtgtaccaaacagctgggctccgtcctcctgcactggccagcggcctcccttgcaggattgacccacaaggtcgtatcctagaggcaagaggaggcagcaaagcctggaatagaggcttgtggaattggaatcaggccgcatgcttaactcatgcaaagcagctccctggaaacctccagaggagaagtgactcaacacacacgtcccagaccctctgggcccctaggcaccctcggcctgcagctgtgggggcaatggaaagtgcctcctttctcttcttccccttgcattattcacagggagccacaaacacagaaaggcctcattcacaagctccaaggcctggccctctacggaaagctttctgaaaatgcaaatgtctcagaagtggattcttcttttcaaacactttaaagtggcatattcccacggagctgtgaagcagaccaagatttccctgggcaggagactccttaaaaataacatttgcatttcaaggaagcagaacttccagctgtgaagtccggcttgaaaatagaaggtgggagcctcacctctttgggcatgggcaggcgtgaagcccccactttccctgtctgtgccccatccccaccttggccttgcctcctccatcctttcattcagtgctagcttaggagtgcccatagtagccctgggtgactggggactcacaagacagaactgttgttcaccagaagctcaaatctaatgagccagacaagcctctaaatgagtcaattccacccccattccagggaccctgggcctgcctgttcccttcccccatagaaccaagaggttctgggttcagctctcctcagaggagcagatctccactgcggtgaaaagcacgggtcatttctgtctatgccccaccacccacacttccccgaattctctgccttggcatttcaaagactaggtcctggcggggcatggtggcttacacccaaaatcccagcactttgggaagccaaggcaggtggatcgagatcagcctggtcaacatggtgaaaccctgtctctacaaaaaaaaaaaaaaaaaagaagaagaaggttagctgggtgtggtggcgggcaccaatagtcccagctacttgggaggctgaggcaggaaaatcatgtgaacttggaaggcggaggttgcagtgagccaatatcgtgccactgccctccagcttgggcaacagattgagactcttatctcaaaaggaaaataaaaaacaaaggctaggtcccttccctggcttctgactcaagcctgcagccaggccttctagggggcccctcccacccctggaggcttcccctggaggagcgggtgccctctcctctctcctctcaggcatcagataggattcaagctgagataacccaggaaaacaacagactccttctctcctctcaatagctttcccattcaccatcaagacatcactcagttaaaatgtacatttccccaccctgatgatacaggattttatactacatatttgttgtctgctttttttcccacttctcaaagaaatctttctatgtaatatctcatttttaaacagctgcatggcgttgcatcatatgcctgtttcgtaattgatcaaatgagattctacagagcttaccttagtgcccatggtactgctcaaagaatcctggctacgatattagttagacccatttacagggagtggggaacctagctccatctggcttagacaataggggaacttaatggtttatgtaactgtaaagtctaaagataacacaggctttggggagagcttaatctgacatgctcttttctttcccactgcccccctttgccttccgtggtatcagcttccctcccctttggttgtaagatggcagagcctggcacagagccaaaagcacccacgggtacaatgggactttgtctacatccggagagagtgcccacaagcctgtgaatttcccagcattctgagcaagagtcctataattcactctaattggaccaactcagttgacatccccaccaatgactgggccccggggaactgggaatgtgttgactggctgaggccatgtgggggccacctaggggccacctgtgagtcagatttggattagcttcccttgaagtgagtaggctgtgtgagagaaggcagaatatccgaatgaaaattacattattttagtaaagaagtgtgggaaaccaaaatatgccacccaaaaatattccttggcatattttgggatggctattcagaggggctgcagacacaggatagctctggaaagctgtgtttttgtggggagttttgaatctgtagtagaaatctacattagtgaagtaaattgtggatgcaaacaggcttcctctgagacccctttatctgccttatccagatctctcaggagaaggagattagaagttctgacacttttaaaggtctgatagagaaactttttttttttcttttagacagggtctcactctgtcacccaggttggagtgcagtggcacaatctcagctcactgcaacctccgcctcccaggtttaagccgttctcctacctcagcctcctgagtagctgggattacaggagcacaccaccccgcccagctaatttttatatttttagtagagatggggtttcaacatgttggtcaggctggtctcgaactcctgacctcaggtgatccgcccgcctcagcctcccaaagtgctgggacaacaggcatgagccaccgcacccatcatgacggagaaattttaccacaagctgccatctgaactcatattgcaggaagaaagactgaagtttgtcaacacactggacatctctactctttctgcaggctgttgcttgtgagccttcatctgcataataagaaaaccttagctcaccatgcatctcctcccctctccttcccataacctattgccacctcccccgagatgctccaagtctctcttcctttccatatggtatagaaacttcagccatttggccctcttttagtctcatagtttgtgtggtccctatgcacatgttcttgttaatacatttgtgtgccttttctcttatttatctattgcccatttatttcagcagacttaaagactcaaaccttcagcaggggagggagagatattctacaccccagaatcaaggaatgctgagaaggccatcaacacatgtctgttttcagtattggtttttctttttttttttgaggtggagtcatcttgctctgtcacccaggctggagtgcagtggcataatctcagctcactgcaacctccacttcccaggttcaagcattctcctgcctcagcctcccaagtagctgggattacaggcacgtgccaccacacccagctaattttttgtatttttagtagagatggagtttcaccatgttggccgggctggtcttgaattcctgacctcaggtgatccacccgcctcagccaccgtgcctggcctgatttttctttttctttttttttttttttgagatggagtctcactctgttgcccaggctggagcgcagtggcacgatctcggctcactgcaagctccgcctcccaggttcacaccattctcctgcctcagccccctgagtagctgcgactacaggcgcccgccacaacgcttggctaatttttttttgtatttttagtagagacggggtttcaccatgttagccaggatggtctcgatctcccgaccttgtgatccgcccaccttggcctcccaaagtgccgggattacaggagtgagccaccgtgccaggcctcgatttttctttttttaactattctcctactaacagatacttaagtttattcaatctcacttttttttttttgagacagagtcttgcactgttgcccaggctggagtgcagtggtgcgatctcagctcactgcaagctccgcctcccgggttcacaccattctcctgcctcagcctcccgagtagctgggactacaggcacctgccaccacgcctggctaatttttttgtatttttagtagagatggggtttcaccgtgttagccgggatggtctcgatctcctgacctcgtgattcacccacctcggcctcccagagtgctgggattacaggcgtgagccaccgcgcccggcccaatctcacttttataagtagtattgcaatgaacatccttaaacacatatttttgccaaggattccttctcagtgccactctcctctgatttccagaccccctcaatatcctcctcagatttgccctgcacttcttgttccatgcttggggtcctaagaacaagccatctgatgcctctactatcattacctctattgggacccagaaaccaataccccaaaatatggtgcatggacatgctgaactgaagaagatgcctcaaggcaagttctctctggcctccccactcgactccccaccccactctctatcgtttgtctctctcaaaacacaggatgaagttgttctctgaagttcctttatctacctaaagtgtggacataccaaaggggaaaaaaaaaaaaacagttacctctggtcccatccttgagttttcattaactgaactcatatctcaggaagaaagaataaagtctgtcaacacactagatggacttttttttcccacaaaccattgtatctgctctgtgggcccaacagacttggtcccaggccacagtatattcttcaagcacattgaattcccctaaaaatcatttgctatccccctaaaatcatccacacttccccatcttcctttcccctaaaaagaaggttatataagcatctgcaccccattgggttaatggataattattctcctgcaattcccctatgctatgcatattaaaataaattcatatgccttttctccaattaatctgccctctgtgagttgatttttcagtgaactttcagagggcaaaggggaagtttttcccctggcccttactttccatagcctgagtaaggaagacagaaatgagttaggaggccttctctcttttttttttttttgaatcggagtcttgctctgttgcccaggctggagtgcagtggtgcaatctcaactcactgcaacctccaccaggaaggccttctaaaattgggaaatccaaggctcagttctcactccacaatggccaactgtggcagtagagtactcaactagggccagaaattctggtgagataccttccttggcccacttatgtgtctttaaactaattatttgctctttcctttaaagcaggcacagccttccaagaggttgtcttggcatcaaataaattacttttcctgtgtcccaccaatgggaaaatcatggaagtctccagaaatatgactgtagtgaatgctgtagtgtgctacccagatcaaggccctcatttccccagatgccagagtgctggctgtttgtagttatgcctgtctctgggcattgcccttggctaaagtaagctgcctcaccccaagatcacaccgcttccccagaggcaacatgaatcaatgacaggaccatgtaggggtaaaaaggcctggaaaaagtcttctcaaaattcatgtctcattttgagaagactctgaaagatcatcccatgatgttttttatgtgtttcagttacctaccgtcacataacaaatcacgccaaaatttagtggcttaaaacaaaatgatttgttatttttcatgattctatggattgatggggctcaactggctgggtcttctgctctaagcggtagagatgaagttactcatgcaaatgcattcagttgggagtttggtgggaactacagcacccaagattaattgcctctcatcctctagagtctctctctacattgccttcattgttcagtagtctaatatgggctgctttatgtgtcacagctgaattctgaagagtgtttcaagaggacaagccccactggggggcacttatcaaatctctgcttgcatcattctagctgatgtcctgttggccacaccctgagttaacacagaattatataccggaagggatagttcactggggctactaatgtaacaacctaccattgtctgccctctgactcttaataattcatatctgcttgcaaaatagggtcatccctaaaggcaaaaacagaacttccaaagtatctttctgtgacaacattaggttcaggcttgaagtccctgatttcgccatcaaagtcagatccaggggggacgatgctattcaggtaaggttccccaagtgttgttcctaggagcagagacctatgaactaaaaagaccagttatctactcctccaacacctgaaaaatactgtagagccaggaaaactgcaatactctcattcaaaaagttgaggagacagggaggcacataataatcaccagtccatagctatttttaagaaaaatatttttgtgtactaatgtaattgcatcacacaaattttggacctttatttttacttttattcaactaaacatattccataatgtcacttgtgaccgttttttagacagggtcttgctctgttgcccaggctggagtgcagtggctcaatcacagctcactgcagcctcaacctcctgggctcaagtgatcttcacgccttatactccagagtagatggaacgacaggtgcacaccaccacaactggctcatttttttaaatttttttgtagagacaaagtctcactatgttgcccaggctggtctcgaactactgggctcaagcagtcttcccaacacagcctccaaaagtgctgggattacaggagtgaaccaccgtgcctagcctattaaaaaaaaatttttttggagacagaggctttcacttatcacccaggctggaatgcagtggcccgatcacagctcactgcagcctggacctccgagcacaagtgatttctgcacctcagcctcctgtgtagctggaacttcaggcatacgccaccacacctggctaatttttttttttttttagtagagacaaagtctcactatgttgcccgggtggtcctaatctcctgggctcaagagaacttcctgcctaggcctcccaaagtgctggggttacaggcatgagccaccatgcctggcctgagcagtgcacttttaaataacctgtgggacaaattaaaaagtggcaaggcctttttaagtgttctggaactgtgatttcagctactccggaggctgagttaggaggatcacttgagcctggaaggtcaatgctgcagtgagcagtgatacagccactgcaccccagcctgggcaacagagtgagaccttgtctcaaaaaaaaaaaaaaaaaaagaaaaaaagaaaagagaaaagaaatatgttgctcaatttccacatattcaggaatttctagatatcatattgttattgatgatcaatttaatacctctgtgattgattactaatttaatacctcagaaaatgtactctgtgtattttcaatcctttgaaatttattaaggtttgtttattaagaggaccccgcatatggtctatcttggtgaatgtgcatatgatctatactggtgaatgttctatgtttttttacacagtctgtcaatctctgtctcttacataaaagtatttaaggccgggtgtggtggctcatgcctgtaatcccagcagtttgggaggctgaggtgggcagatcatgaggtcaggagatcgagaccatcctggctaacacggtgaaaccccatctctaataaaaatacaaaaaattagacgggcgcagtggcgggcacctgtagtcccagctacttgggaggctgaggcaggataatggtgtgaacccgggaggcggagcttgcagtgagctgagatcgcgccactgcactccaacctgggtgacagagcaagactccgtctcaaaaaaaaaaaaaaaattttaggtcattgatattagataactattactgtatggtcgggtttaccatcttggtttggttttctatttgtctcatgtttcttttttctttgcttgcccttcttgctcttattttgggtgaattggatatcatgtagtatgccattgacttcatttattaaattttagctcagcctcttggtgttgcttctagagttttctctagaaattgaaacatgcatctttaacttgtccatgatactaaactccagcctgcccgtcagcatatcccctctgcctcccatgtgtcacctccactgtggattgtctgtccctcgtccacaccatttctccagtcctgggatctgttcctgcatgcattcgcctaccagatacacacttatcgagcaacacactaacgcaggaagaatgtaccaaaaaatagaaggagagttggctccttccaccactagaagtgacaagtgacaaggcaatttaatcattaactattaactaaaagaccaatttgagatgatgctgttgatgtaatattattataaggataaagccaggccgggtgccgtggctcacgcctgtaatcccagcagtttgggaggctgaggcgggtggatcgcttgaggtcaggagttcaagaccagcctggccaacgtggtgaaaccccatctctactaaaaatacaaaaattatccaggcataggggcacacactggtaacctcagctactcaggaggctgaggcaggagaatcacttgaaccaggaagcggaggttgcagtgagccgagattgcaccactgcactccagcctgggagacagagtctcactctgtctcgattttttttaaaaaaggataaagccagcccctctctttcactcttccaccgtctcacaagcattcctggtcagatagacctaaatgtaagcattgtgggctactgcacaaaaagatcacccgggtgcagctgcagtcattgaactagaaaagccggaaagatcctgggtgatgtggaaccaatattccacaccggtgcatctgaggatgctttaacagcatcttgaaataataagaccagtgcacagatctatatttgtaaggatgtgcacagaagtgccttttataattgcataaaagttcattttattagggcactgattagaataaactatggttaatcatatgcataatactattcagccttttgaaataatgatgttggcctacagattacatggaaggatatccagaatgtgtatgtccagtgagaaaagcaggtcactgaacactatatactgggtgatccggtttgtataaatgtattatgggcaatgagatcacagtataaggcgtacagtatggatgacatctagttttgaatcctgctatattccaggacataacacagtgattaacagattaacacatagtagtttatcaataaatatttgttgaatatacacttaattaaaaatctggactgctaaccccctagttactagtaataggaagatgggtgataattttttcttttttaatgactttaagttttatttttttctacaagaaacgtgctgagaagaggactgcaatgactgctttcaaaaaacaccagaataaatacatacgtagtgtaagcaagcgaccactgttgtatcaaaagccctttgttgtatctgttggtggcggaggcagccagcggttaactgaggttctactgagctctgtggaccacagagttgtcttctcaagtttgcttctagggacaaattagtgactttatgatgtcaatctgtcccaagtccatggccaaagagaaaaaaataatgctgaaaaagtcaaaattcttagaattcttagagaattataaaactgcataggggctgggtgtggtggctcatgcctgtaatcccagcaatttgggaggctgaggcaggcagatgacctgaggtcagggatttgagaccagcctggccaacatggtgaaactccatctctactaaaaatataaaaattagctgggcatggtggcgtgtgcctgtagtcccagatactcgggaggctgaggcaggagaatcacttgaacccaggagatggaggttgcagtgaactgaaattgtaccactgcactccagcctgggcaacagagtgagactccgtctccaaaaagaaaacaaacaaacaaaaaaaactgcacaaggatatgaatttctgaatagatttctgagtcacattccactatccagagaataaagataagttcataattatggtgtccagtatcaagtacataccagaaaaagactttttaaaggatgcaagtagataacaattctttctttctttctttttctttcctttttttttattttttgagacagagtctcgctctgtggccacgctggagtgccgtggcgcgatctcagctcactgcaacctccacctcccgggttcaagcaattctcctgcctcagcctcccaagtaactgggactacaggcgtgcaccaccacttccagctaatttttgtatttttagtagagacagggttgcaccatgttggccgggatgctctcaatctattgacctcgtgatctgccagcctcagactcccaaagtgctgggattacagacgtgagccactgagcctggccgatgacaattctttctaccacagtaaacacaggagtggtaacaaaatgattattctcagactaaaatgaaaacttaaaaccaaataaaatccctgagcttccaggatcagagaatggcacagagagcagtataagaggccaggagaaaatataagattttaaatattttatgtgtacctttctttttattttcgactgactaaaaaataaaggaaaaatatttaagttaactcacaaaatactttttttaaaaaaagacatggaggacattaggaagaagggaaagaaaattaggtcgaaagaaataaagtgaatccagggatgagattaatacacaaaatgtttgccttgaaagtcctttacacttgctagatatgggtcacaatttgactcagcttcccagcagcctatgcaaagaaaaaacaagaccagctgtattactcacaatgtccattggataaaaacaaatccagtgctcagaagaagacaaattccaagaccagaaaggtatttcttccatgtgtttctatccaaatggcctgtgtcacgtagtaaacaaggccctaaaaccatctttacagtaaacaaaacaatgagtacctcgaggattgttaacctcccttatttaagttaacacattaacccatgtgaatgtaaataaagcaatcctacaggggtggaaagcatggggtcatccaagctgccatattcaatcccaaaataaatgctaatgaggaatggagctctctcgtgcatgaatgaatatgtgactgcccatgatattgtgatacaataaaaaatatatatttagtcttcatcccacgttcctggcacagagctcctaaaacccttggaatttctgagtgataggagtgaggagtatttgttacttatcataagccttcttcaaccaaacctgagtttatctaataagctgacacttggaggctggggctgatggccagaggaaataaccatgtattttaaagggttggaactttcagctcctttattccccattcccctgacccctactccccaaacacccccacctccagagagtggagaagggctacagattgaggtaatcattaatgaccaaagatttaatcaatcatgtctacataatcagaacctctataaaaaccccaaacgggccaggtgcagtggcttatgcctgtaatcccagcattttgaaaggctgaggtgggaggatcacttgaggtcgggagtttgagactagcttggccaacgtggcaaaaccctgtctctactaaaaatacaaaaattagctgagcgtggtagccttcacctataatcccagctacttgggaggttgaggcatgagaatcacttgaactcgtgggatggaggttgcagtgagctgagatcatgccattacactccagcctgggtgacagagcgagactctgtcaaaaacaaacaaacaaaaaaggcatttggagagcttctgggtgggtgagtatccattctgggagagtggtgcactccaacttcataaggacagaaactcctctgctcgggagcctgtgggacctttccctttgtacctgctcctcacctggcttccatctgtgccctttattgtatcccatataataaccagcaaacacaaattaagtgcttccctgagttatgtgagctgttagaaccaattacggacctgaggaagggttcataggagtccccaatttgtagccaagtcagacagaagtgtgaataacctgggggcccactatttgagattggcgtctgaagtggggggcaggcttgtgggactgagcccttaacctgcatgctttgatggaactctagtttgttcatgctagaattgaatcactggacacccagctggtatcctcagagaactggagaatttcgtgatatggaaaagccacgtatttggtgccagaagtgctgtgagtagagagcacgctttttctttgtactgccatggagacaagtcttcctaaatgtttcttcaattcgaccaaatgtttgctaagtattgaatagcagtgagtttgaggttgtggctctgatctaacaaggatccagaatattccacattgctggttaagtgtaaatctcaatgtttgaatagacagctgcgcagggttaacaacctcttctgaaattcaaggggcccaaatagaggccaccagaacccccacagagcggggccaagcaggacccagacaggccactccagtttcaacttcagactcacacacaaatgactgggccccaaattcttgtatcagtgttcctgaccttttcaggttcaggaaatatttttaatgctccccatgtgtataatagtaattgtactgttggaattggttgactgaaaaatatacacaatggccaggtgttgtggctcacgcctgtaatcccagcactttgggaggctgaggtggacagatcacttgaggtcaggagttcgagaccagcccggtcaacatggtgaaaccccatctctactaaaaatacaaaaattagccaggcatggtggtgggcgcctgtaatcccagctactcgggaggctgaggcatgagaatcacttgaacccaagagacggaggttgcagtgagccaagatcgcaccactgcactccagcctgggtgacacagcgagacttcatctcaaaataaaataaaataaaataaagtgtacacaatgacagactccttgttaaaatttatgcatgtaataaatactcattgtagaaaacccaaccacacaaaaatcaaagattttttttaaatcaccattttgcttacctggtgcccagatagatatcattctattggagtgggaggtcttttgggcaggtggggtgccagggtctatctacttctctctaaggaagccaacagggaatcaaatattctctcttccaggctctttataactagtacatagtcatgtgatctgagcttagccaatcagatgctcctgccaagggctttggattgtgaggaagtgatgcaaaggccctgtggtcaaccagagatttttcacaatggctgcagcagagtcaagagtccaataccatggtcctgaggggccagcagcaataatgccagggccagcatcccaagctgactgttcttggtctccctgattccagcagaacatcccagtggggattctttgatatgtcccttgaattaagtggctgccaggtccccttgagaaaagaccatgtgataacatcaaaaaaatattctctgttttagcccttcctttcccacaggggaactgaccatggaccagggaaactacagtggggaaagggatgatccagacctttgagggggtttgggacagtaactgtaaactgacacagaccccctggggaacagaacactactgacaaatttgatgggattcctgttcatggtaggcctgatggaatcctgaacccatcacttctccagtgcctgggtgtagagttggaatagatcccctaagctacaggtggaatctccacactggctctgtgacccaaaaagtaagggctattatgacagagggagcaaagggaagcccttggaccctccccagtcccttcaacaaaatagcaaatctagaggaacactgcgtccctgctgggaacacagatgttgatatcactgtgaatgagtcaaaaggggtgggtgtgtgtgtgtgtgtgtgtgcgcacgcgcgcatgtggaggcagtgggtgattcccctcacagctctacgtaagtctcccgtcttctggccagtgcagaatggtggctcctggaggggtggacagcagcacattgtctgcatcttgctcgtgggctctgtgctgggtggaccttagccacctcaccatcctgcaggacatcgtgctggtccactgcactgaccgtatcaggcctaggacttggtgaggtgccttagatgctccagaagttacttatattcaccaatggcctccttatggcttccaataggaaataagtgaacgggtagattaattactcagtgttttatacaaatagattggacaaggcttggctcttaaagacagcaatcccaaatagcggcaagctgtttagcttttttcttttctactttgtttaatatattttctaatcaaagtatgtaataatatgcataaatttttttttagggcaagtagaacagctttttacaatggaaacaaagccgcctcctggttttccttccaactctgagctccactccaaaaaggccaccgcttttttaatgtaaacttgttattaaggacataaatcataagtgaccagctcaatacatttttacaaagtgaacacacctatgtaaacaacacatacttttaacaactcaggtttgagtttttgggtggttacttccatgcagcaaaataagatcctcatgtactactttatttattttagtagtattattattattatcatcattattattttgagacagggtcttgctctgttgcccaggttggagggcagtggcactatctcagctcactgcaacctctgcctcccgggttcaagtgattctcctgcctcagcctcctgagtagatgggattacaggagctcaccactatgcccagctaatttttgtagtttcagtagagatggggtttcaccatgttggccaggctggtctcgaatttctgacctcaagtgatctgcctgcctcggcctcccaaagtgctgggactacaggcatgagccactgcgcctggccttaactttaataaacctatttttgagtagacagttcattcctgtggaacaaaattcaaaacaaacaaatggataggcagtgttaaatgtccctcccacccataaatcttaacctgtcatttccctttgtcagaagccatcctgttaccagtagcttggatttccttctaaaggcaatctattatttgacctattttaaatattttatttaataatttatgtcctatctcaatataaaacaatttaaggaagatgttgggttatacaatttgaagggcagaattcctctcaaagcagtgaaaactgacaacaccaaagaagtaaggtgttcactgagcttttccaaatatcgttaacaattcatagaaagatactaattcttttggcctttccctcatggtagcaagatggctgccatagctccaaatatcaagtcttcacacaacattctgtgaagcaaggaaggtgatggccccaaaagggcctgtcaacttccctagtcagggaaggaaatctttcctggaaatctctccttgtcttggactggctagaagtgagcagcatgcccacctcaagaccaatcactagcaatgaagaacagttggcttcatctattcacgcttcaacccctgaggctgggtccattgcttttacaccaaaatcagggctcagtaagcatgagtggccaatgagcagaaaaccaacagtgtctgccacagccagtacctttgtcctgtcactgtctaaacctgaaaaccaatctaaactaagttgttaatcaggccatggaaataaatcaaccttggaagagaatgatgatagcataccttctagacctgtgctgtccaatatgggagccactagccacacgtgccatttaaacttaactttacattacttaaaattaaacaaaactttaaatgcagttcctcagtcacacaagccacatctcagctgttcaatagcctcatgtgactagtggctactgtactggatagcacagatttagaacaatttcttcattgcagaaagctctactggcaaccactgcctgtccatctgccgctaccactgataagaggcttctctaaagtggtgaagcgagagtttctctaaagtggtgaggtggtgccaccttagtgtcattagcaacaccgccatcatctttgtccagtgcaacctgaaattggtaagctgaacatcctctagccagtgatcacagaagctccctgtcctgcagagtcacgtcagggtcagtcacagagctctgacaagatctggtgcagaggaacctcatgtttccatgcactcactgagcccatcttcctgaccgggttcttgatccacccctctgggaaagagaggcactggccaggagctggcttgggcaactaaggttatcataagattattttaatggtcaccttgttctatatcaggcacctcgtgaacgatgatcatgaagtcacccactgcccattgccccaacacttgcacacttcctattttttcatcagccggggaccgaggagctgcagaaagtgaacagaatgagacatacaggtacaggggcagggcgtctgtggtgggcaccggccctcatgcccaccccacagatacagctcacattgtatttgatagtctataaaagggcacctgctctgagacttgggggaggaataaggttgcctccagtaataactgctctttgctccactttaacctcaatgggcctgacagttgaggtgccagcttgggtgcagttggtgcagccctgtcctgggggagggaaaggccaaccagggtcccattcaactcttagagaccatggtttcttcctggccaattttggctggtgccattctcccaggaggggaccttgggagacttacactgaagctctaacttgatctggcccagtagatttgaaaggaggcccaaattgagtggcttcgaagtcaccatatgtccttgctgcacaaatgagctgctgttctcctcctcacccctactggggcctcagatgctcacagatccccacgaagtcaccttgcagctgtggccaccaaggtgacaggtgtagacactctccccacagttatgtgccaggtgttggctgacggaggactgcccccactgtgatgccctcagccagtacaggtgtgtcctgggggcctgcctgcccctcctcctggcaccactgactagtccagggctcagcaggagcatgataggcactgaagcctggtctctgcccgtcagcatttcctgcaggcttcttcaatcccatttattcctagtgttccattattggaacgctaagcatgtgggagttatttatttcctgctgctcaaggtcattgccaaggtctgatttttcacacatgtctgcaattcaaaaaattgcaacctcctgcataagtgggttaacaaaccttcaccagacccctaaagttcaggcgaaattgagatatttgacccccataagaacaccagctggcacagagatctgcattcctggtgccctcatgggaaccagcctgggcctggcagaggaggaaacgaagtcccagcacaccagcgagcaggcctgctccacctcaggggcacccagcacttgttagacccagtttcaagtttccagcccctcttcccacctcagcctctttcctccgtgggtcctgggggctcctccaatttcctttccctctgaggtcttcctcatgttaaagatcttcctccctccacccagctccccaggaagccagaaagtctccccaggtccagccttccttttagcccccaaatcaaacatcttagggaaaaagcggaaaagtacagggagagaagagaggaaggaaaggaaagaagagagaaagggggaggtggggagaggggaagcggggaaaggaagaaagaaggagaggagaatagggtgacagagtgtgagtaaagagggaaaaggagctggcaagcaactagagggagattactccttgttttccaaaccaacactttctggtcacttttttttttttttttttttttttgagacaagtccttgatctctcacccaggctggagtgcagtggcacaatcacggctcactgcagcctcgacctctcgggctcaagccatccacccaccccaacctcccaaggagtaactgtgactagatacacactgccatacccaactagctgtttgatttttgtttgtttgtttatttagggatggggtctcgctatgatgcccaggctggtctaaaactcctgggctcaagaaatccttccacctcagtttcccaaagtaccgggattacaggtgtgagccaccacaccagtctcttatcacttgattcccaccaaattctgtttaaatgaacatgaagaggtaaagtatttcaaaaatcccagtttactttatatcttcattgaacaccagagaaagaagaagtccattaattttatgatgtttttctaaggtgcggtgggagaggaggaagaaatattcttggcatcttgcctttttttaaaaaaaaaaaaaagatctttgcagtttcctgttaatttaataccagaacctttgctgtgtaaataacacagataaagataaactttactggccctggactccaaccttcgtttaacattccacccccctctgatccatcccgcatcccgcctatggaaatttgtaattagttgtggagatttagaggctgagaatatatagttcaggaggcagagcatgttggttttagacaagccttgtaagaatgtgctaaaaatcccagtatacctgacagtgcttctctagaacttgtctttctctcttcctcagaggtgacctggatggggttaattccctttctggtcaacttgtaggtttcaccctggctctgccacccaccctcccagtttattatacccacttaggctgtgctttgctggcatggccttgcactgttatttagacaagtgatttaatccctcttacttgctattattgagcactcttagttcctctttttttttttttttttttaagatagtctcactctgtcacccaggctggagtacactggtataatcttggctcaccgcaacctccgtctcctgggttcaagcgagtctcctgcctcagcctcccaagtagctgggattacaggcacacaccaccatgcccagctaatttttgtatttttattggagacggggtttcaccattttggc

SEQ ID NO: 49 - DNA, 829 bp, Homo sapiens
agctggaggcccgagccaggctcctagggcagagggcaaacggcccctccaggagggagccgggagattacgcagctccatgtaggtccacgtttaggttgggaggatctaccatgaagaaggtcaagaagaaaaggtcagaggccagacgccaccgagactccacctcccagcatgctagctccaattccacctctcagcagcctagtcctgaatccacaccacagcagcctagccctgaatccacaccacagcattccagccttgaaaccacctcccggcagccagcattccaagcccttccagcacccgaaatccgccgctcctcttgctgccttttatctccagatgctaacgtgaaggcagcccctcaatccaggaaagcagggcctctgattcgcgccggcccgcattcctgctcctgtgccacttgcccctgcagctccgcttgctggcgtcgtctggggctatgccatagccgcatcttcgatgtccttctgcctcgggactggcagatggcgccagggagaggactccccaacctgctcaccttctacagaaaatcttcaagaaaaccctccagtcatcgtaacgcgtgtcctccaagccctcggaactgtggctgtggctctgggggctctaggagctgcctactacatcactgaatccttgtgaacaagcccctaggcccacagtctggcagacctccaccagccccaggagttgataggtgatggcgctgggagaagatgttcagaatatctcaaaagccaagtccagaagatccagtttccatcaaagggacctctcttgtcaccaaaatttaaaa

SEQ ID NO: 50 - protein, 183 aa, Homo sapiens
MKKVKKKRSEARRHRDSTSQHASSNSTSQQPSPESTPQQPSPESTPQHSSLETTSRQPAFQALPAPEIRRSSCCLLSPDANVKAAPQSRKAGPLIRAGPHSCSCATCPCSSACWRRLGLCHSRIFDVLLPRDWQMAPGRGLPNLLTFYRKSSRKPSSHRNACPPSPRNCGCGSGGSRSCLLHH

SEQ ID NO: 51 - DNA, 855 bp, Homo sapiens
agctggaggcccgagccaggctcctagggcagagggcaaacggcccctccaggagggagccgggagattacgcagctccatgtaggtccacgtttaggttgggaggatctaccatgaagaaggtcaagaagaaaaggtcagaggccagacgccaccgagactccacctcccagcatgctagctccaattccacctctcagcagcctagtcctgaatccacaccacagcagcctagccctgaatccacaccacagcattccagccttgaaaccacctcccggcagccagcattccaagcccttccagcacccgaaatccgccgctcctcttgctgccttttatctccagatgctaacgtgaaggcagcccctcaatccaggaaagcagggcctctgattcgcgccggcccgcattcctgctcctgtgccacttgcccctgcagctccgcttgctggcgtcgtctggggctatgccatagccgcatcttcgatgtccttctgcctcgggactggcagatggcgccagggagaggactccccaacctgctcaccttctacagaaaatcttcaagaaaaccctccagtcatcgtaacgcgtgtcctccaagccctcggaactgtggctgtggctctgggggctctaggagctgcctactacatcactgaatccttgtgaacaagcccctaggcccacagtctggcaggaggtgcttttaatatgctgataaaccaacctcaggaaggtattatgtacagaagattcccaaggctgctgttgctgaaagagacttgggctactgccggggaactagaaacgtgctgagaagaggactgcaatgactgctttcaaaaaaca

SEQ ID NO: 52 - protein, 183 aa, Homo sapiens; identical to SEQ ID NO: 50

SEQ ID NO: 53 - DNA, 1066 bp, Homo sapiens
agctggaggcccgagccaggctcctagggcagagggcaaacggcccctccaggagggagccgggagattacgcagctccatgtaggtccacgtttaggttgggaggatctaccatgaagaaggtcaagaagaaaaggtcagaggccagacgccaccgagactccacctcccagcatgctagctccaattccacctctcagcagcctagtcctgaatccacaccacagcagcctagccctgaatccacaccacagcattccagccttgaaaccacctcccggcagccagcattccaagcccttccagcacccgaaatccgccgctcctcttgctgccttttatctccagatgctaacgtgaaggcagcccctcaatccaggaaagcagggcctctgattcgcgccggcccgcattcctgctcctgtgccacttgcccctgcagctccgcttgctggcgtcgtctggggctatgccatagccgcatcttcgatgtccttctgcctcgggactggcagatggcgccagggagaggactccccaacctgctcaccttctacagaaaatcttcaagaaaaccctccagtcatcgtaacgcgtgtcctccaagccctcggaactgtggctgtggctctgggggctctaggagctgcctactacatcactgaatccttgtgaacaagcccctaggcccacagtctggcagaccccctcaatatcctcctcagatttgccctgcacttcttgttccatgcttggggtcctaagaacaagccatctgatgcctctactatcattacctctattgggacccagaaaccaataccccaaaatatggtgcatggacatgctgaactgaagaagatgcctcaagggtcatccctaaaggcaaaaacagaacttccaaagtatctttctgtgacaacattaggttcaggcttgaagtccctgatttcgccatcaaagtcagatccaggggggacgatgctattcagaaacgtgctgagaagaggactgcaatgactgctttcaaaaaacaccagaataaatacatacgtagtgtaagcaa

SEQ ID NO: 54 - protein, 183 aa, Homo sapiens; identical to SEQ ID NO: 50

SEQ ID NO: 55 - DNA, 61209 bp, Mus musculus
  misc_feature (1)...(61209): n = A, C, G or T/U
ggaacacatgagggctaaagtaggtcagctcctagggatggaaggggaagggagggaacacccaaaataaaatgcttaagatgaaggaagaaacctgtaagctgactttaaaaacatggtaaaacaacattccctgactactgtctgtaggacatctgtgctacactacacgtgtggaggtcagaggaaaacttgcaggaattggttctgccacatgggtcctgggataagagttgggtcatcaggcctgataggaaacagcttacccactaagccatcttgtttacctaagatcttaaaacactgttactgaatcatatggggataaatggttagagggcgggggctcagcggttaagagcactgactgttctttcaaaggtcctaagttcaaatcccagccaccacatggtggctcacaaccatctgtaatgtgatctgttgccctcttctggtgtgtctgaagacagctacagtgtacttacatataataaataaatcttttaaaagaaaaatggttggagtgggtcctccaaatcctcacttggtctgttgatatgaggccaactagggcattagggatgggatagcaagaaagcatcagtgtgagtgtttgtcaccatttgaggtgcctgctaacatcatgttgactgtagcaggtgaagtgggcagggttggtgctctgaatccacccctggagacatgagttcggggagaagaaaagcatgctgccatcttggagtcagcccagtaagacctgctctcccatcacttctggagcagtataacttgctgatgtttcagtgacccataggatttgattggttttccttcgaaaactcaagaatctatctcaagaacagacaccagccttgcacattacagtgtgctgggcttccgcaggtttgctcttaccccaggacacagctaggcaggaaaggcgggtgaattggtatctgggcttcctttttacttcagagataactagacaaacagggcaggagggatgcttgtggttctcacatgctggggttttaggtggggagccagaggcctgctagttgcagaataccaaatggttctgagagacagaccaagtcaggagccacgcttagggcctagtactctaccgagtgcatggcacgtagcagagacttactgaaggtttggttttgagactgtgtgttagttattccagagctgcctcaaacttgctgagcataagcttgaacttctgatcctcctgcctcttcagcctgagtgctgtgccaccaaacctcgcttctgcaatgctggggcttgaactcagagatttgtaggtagtttactggcctgtgattcccacaccatgctatgtatgcttgctcattcatttctggagggcagtgtttgctacggtgcatgtgtagagctcagaggacaacttgtgggagttctctcccgctctgtgggctccgtgaatcagattgagttgtcagacttgatggtgagcacgttgcgttcccagtcacctctctgaccctcacatactattctaaagtgaacaattttgttatcgtttatagatttaagatgtatagtcaccaggtcttaacactagccaacaaagacattggttgtcgttcaggttaagatctataagcagcagattgatccaaaggaaagtggacactttttttttaaagatttgtttattttatgtatgagagtatactgtcgatctcttcagacacactaaaacagggcatcggatccctcccgttaagatggttgtgagccaccatgtggttgctgggaactgaactcaggacctttggaagagcagtcagtgctcttaaccgccaagctatctctccagcccatttggacacttcttaagggaagaccactacagaaaaccacagccagtcaaaatgcagagctgtggaccctgtaccttaaggctcggggagcattgctgcagaggggcagaaaggttgtaagaaccagaggagtttgctgtgaactgttgcctagtaacatcagaagctacatctgcagagtctcagcgctgtgaccacccaaatgtgagctgagctgagcagggaggccaccaacagtcacagcaaataacagggcctcacacagcctcaaccctacacaactataggcaactgagtcaagctggcagtgggagaggtggtcctccctaggcaagaagaacacatcactctgttgtctagtgccaaatggtcagcctgagagcatgcatacaggtaacatatggactcaatatgttatatttaggaatatgtacacacatatagtaacaattcatgtaaggaagaggccatggatttgaaggagagtggggaagtccatgaagtgtctggagagaagaaagggaagggagacgtcttataattatagtatcaaaaaaggtatttttttaaaaaacaataaaaggctagcgactggagctactgaggtggctcggaggctaaggatatttgcacccaagcctgacgacctgagtgctgtccccagaaccctcgcggtaaaagacaaccatctcctgcagctttgccttgcacctccacttgcatgttgcggcacgtgtgcctgcgcatgggcacacgctaaataaatgcaattttcaaatgttttaaagcatatccacataactttgcacagatgtcaggttcgccgatgctagaatttatccaaagtaggcaaaggacactgagttctttagaagtgtactcactgttatggagaccgcgttggcattggggtgtagtgggcaatacagaacctaaagaagcacgcgggcgtatagcagccatcagtggtggaggaaaagaggaagtcggatgcagtcctcctgtctctaaccctgcactaaacattttttccaggagcttctcttcacacatacacacacacacacacacacacaaaacaaaacaaaaaaaaatggtcaggctgttgtgttgccttgtacaaatgaaaaggaaatagcagggagatggagcatctttctcagccagggctcctatctgcatctaccaagatcccactacacaaacctggagcatcagcagcattgggtgtgagtggtaaaggactccggtgccccttgggggtaagtatccttatgctcatcatagataaatttgcacaagggagaaagattaacttggaccaatggggagaagtagaagaaaagccaatttcataccaatagtcctcctgcaaccaaactgtaatggcacatgcctgtaagcccatttgggaggctgaggtccagagttaaagaccagtcaaggctgcagagtgagaccaaaaataagtgtgttatgagttagtgatttcccaatcttgaaagcactcagtaaagtgttgagaataatgcacaagaaatccaaagaaaagctggagtgtggacttgattttatttgtaaggtcttgctactatgagagtttgtgaattatgttttcataatattagccagtcccaccccaaacagccctctgttctatggaggattaattaagagatacaagtagggattgaagtgataattttcatttttctcagtattgtattttatatttgagccttttgcctgcatgcatgtctgtatactgcttgcatgcctgatgccttcggaggccagaaaagggtatcacacccctggaactggagttacatgcagctgtgagcccctgtgtagtcagtgtgtactggggatctaacccaggtcctctggaagagcaaccagcattcttactgctgagtctctagcttcagctgatggcttttaaaagctcgtgttccctgataagtcttcaaaaatggcagcctcttcagacttcctcatgtttgctccataaagctctgccggaggacatgccatctttatttgcagttgatatttagcacagtacctgctttcctccaccatgtgtcccctaagatgacaaggccatagcaccacccctcccccacaaagccctgaccttagtgtttaaggttgagacacagggcttggagctgctgctccctgtgggtgactccagagaaaggtcccttgtgatcaggatgcctggaatggaggttcaggccattcaactccaagaagaaatctaagagaaagatgaaagactgtgtgtgtgtctggagttataggtgcctgtgtatgtgtgtctgtgtgtgtctgtgtgtgtctgtgtctacccagtgtgggtactgggaactgaattcaggtcctctgatagagcaacaagtgttcatctttgagccatctcttcagcaccgccccccactttttctttttctcatatgtagcccacattgtccttgaacttaaggtcctcccgctttaaccagaatgctgggattaataacatgagacattgtgcccaactctgaaatcacctattttgcaaagtaaggacttttcacagagcacagctactctgtgcttattttatagaatggatgtttctgtccttgtgctcctgagctatcttctgaaatgtttaagggttaagcattgcacacacacagcaagcgttgctggtcttgccaactgggtgtaggtttattgtgtgtcttccaactgttccctgggctctgcaatttcaccatgcagttatgtaatgcacagctacagactggcagatctgcccttgcccagagctgggaggtctgtggaaggcttgatagaagcaagtgttagatctcactagaccttatactgatggtgggcaagtcacatgggttctgaaggctgtgttgtaaaggtgggaagagtcacaccgaaatgctgagagcctcacaatcatgtctggtatctggaagatatttggcttttagaaacaagaatgcccttctgtcccctatttctccatcaagaagaggagaataaatcaccatagaccagaggctaaaaatgatgcttccacatggaagtatttggattcctagttcccatacatgcatgcacacacagttaaggcacttcagtgactaagatgtgcttatctgcactcttcttgtagcctggcacccctgaatcaatgagaggatgcaggattccaggagcatatagcttgtaggcaggtccaaggcctgttgccacgggagtcctttcagctggaggattagagagatctttttttttttttcttctcttttgaatttgtgaatctttttgctttttatatttttgcctttagttgttatcctgtgtgtaggtgatgtgtatgtgtgagtgtgcacaggtgacagcttgtgtggggaggtcagaggacagcttggtgcactcggctctctctgctcacatttctatgtgggttccagggactgaactcatgccattagaattctgtggcaagtatctaccactgaaccctattgttggtcctagtgttgggggtgcagggttggcggggtggggatgccagggaaggttaatgtaggccaacctgtgtagacctaactggctttgaacttgcagaaatcctctgattacaggcatgcaccatcacacctgtaatcattatttttatatttgaagaaaaaatattttagaggttttttgtttgtttttttaattttgtgtatgtgaatgttttacctgaaagtatgtatgtgtgtaactggtgcctacagaggaggaggaggagcggatctcttggaactggaattatagatggttgtcagcaaccttgcaggttttgggacccaaacctggccctctgcaaggccctccagttcctgtttttatatttcaaatggataagttagtctcctggatttatttttttaaagatttatttattttatgtatatgagtacactgtagttttgagtcttcatgcggttgttgggaattgaatttaggatctctgcttgctctggtcggccctgctcatttttaattataaataagtacactgtagctatcttcagacacaccagaagagggcatcagatctcattataggtggttgtgagccaccatgtggttgctgggatttgaactcaggaccttcagaagagcagtcggtgctcatactcactgagtcatctctccagtccgtctcctggatttataatccagtttttgtttcttttgtttttgagacagagtctcactgtgtagctctggctggcctggaactcactatgtagaccaggctacctcctgagcactggaattaaaagtgtgtgtactaccatgcccagcctatagcctattttaatgctttatctttactttagtttttaattttctttttaaattttattttacatgtgtgactgctttgtgttcctgcatgtgtatatgtgtaccatgtgtgcacatggtgctggtgggggtcagaagaaagtatcaggtcccctgagctacagggggttgtgagccaccatgtggatgctgggaattaagcccagggcctctgcaagagcagccagtgctcttaactgctgagccatctctccagccccttattttggtttttggtacagggtctcctgcatgtaccaaagcactcatgtagatagagatgggagcacagcttccgggagtagagtctccccttccataatgggaagcaggggttgaacttgggtcattattaggtttgcacagcaagctcctctacctgctgaggtcttccagcctctattcagtaaatctcatctgaacccttttcacatttttcccagtttatccaaaataaactgtgttaattttgtgtttattcaaaaccccacttatccgattgagcatctcttctggggtcgcacattacacaaggatgttgactccttagcacatcctgtttctcggccagaagcaggatctaaagacttcctggatccaagctaaccctaggcaatacctcgcaggcggttgggacagtggtccatatgtgtcactttctactagagggaccttgtccctgtattaccttattccttggtggcttaagtaacaaataaatagtcctagaatttgaaaatgtcagttttactattattcaggtgtgatgatcaggaggcaactgtaccagaatgagatttgtcactcatagttccccagaagagggggcttgccgtgccacacagaaccacactgggaaacgctagggtttgcagggagtgaggggaaaccatggcaatgctctttttgctgtttccatggaaatgataggcaagacagaccatggacaatctggggagtatggggggggggtctagctgtgattatggcagactagggcctggagaataacagccttgatgaaaagagttggggtctgagggaagcatgaggtgtaagcctctgctactagctctccagaaggggaggcaggaggatcatgggtttaaagccagcctgagttaggtcagagactccaaaggaggagagcaatggggaatgtgggcttcgggtcaggagcactaggatgccaggaggaaggtgattgggaatataggctctgggccgggagcactgggaagccagggtttttaatgtctgtctctaggagaagagcaatctctgaagggcccacagtgtcccagctgcagaaactaatcaggtttgatggcacacacatataatcccagtatgggaaaggggtttgggggggatgctaaagcaggagaattgctacgagcaggtacagggtgggggacacactaaacaaacctaaaaagctaggataaatataactgcagttcattggataacgttttcctttatcagtccttttacactgaactgggatttgtccacttaaaaaaaaccctttggggctggagagatggctcagtgatcaggagcactggctgctcttgtagaggatctgggtttgatttccagcacccacatgggggttcacaactgtaactctggttctaggaggttctgcgcctctgtaggtactacatataagtggtacacagacatgttctatggcatacacataaaataaatatctttaaaaagccgacattgtggctggagacgtggcttagcgattaggagcactcactattcttggaaagaacctggattagttcttagcacccacacagaggtccacacacaaccatctatcccagctccggagagctgggccccctttcaggcctaggcaagcaccaggcaaattcatgatgcacatacatgcagacaaaatgctcatatacataaccaattttaaagtaaatctttttagaaaatgttttgccaggtgtggtgttgtacttctttaattccagcacccaggaggcagaagcgaatggactctgagtaaaagaccagcctggtctatgtagggagttccaggctagccagagtgacatagtgaggcctgactcaagaaaaagaaaagaaaaagttttgactcaaaggctaagatggaaggattttgagttataagctaaccaaaggtatgtaagcatgactctatctcaaagtaatgaattcaaataagaagttttcccttggaaattaaaagctttggcaattttaggtaaaactaaataaaggggacacagaagagagcttttgggggacagagattgaaatagaatgaagtacagtgacagatgtgtggaaatactatcatgaaatccatcgccatggtaaacatgcttcactaaaccatcagctgttactgctgcggcccagagacttgactttctaagtgtgtggggtctcaagtactcttggttttatggttgggaacggagaagaagaaggaggaagaagaggagcagcagcagcagcaacagcaaaagtgaaaacaaaacaacaaaaaaaaaaaaaaaacaggtttactaaaagcaaaggagaacagcaaaccaaacggttggttgatgggcagagtggtgaggaataaggtcaggacctggcaggcattattcagactggatggaaagccagcagatttggggacaaatgctaacaccctcactccagatatcacaataagccttttgttgctactgttttattgctagagtgatgcccactgtcagtagctatagcatcccaatcattccgagtgtgtttgggagcgtggcttactcctcactaagtgagggcaacacagagtggtggatactctgcctcacaggcccagagtctaataaggaaacagaactgctagtaaggatgaatggcaattgtgcctctggcctaggcctgtgcctggggggacttccctgaggcaatgacacttggtcaaacttggtagaaggtagaaggctcacttatgttccaagatgtctgtctccatgcaagagtgacaggacctcccccagcaggggaatcatcaggtcagggttaagaaagtctgtactgggtatagagaagggcctgggatgtagagatagatgcccatcgggtgatggagttattaccgtctggggaagcctagctggcgtgtagacccatactgaacgtgtaaagacaaggaaagatacagagggcccaacagaactcttggtgtgtagggtgaaggtaagggccacgtgcagcccagccctgggctgacctttctccttgacctttttctttatataacaccctaatgctgctgagcttaatcaggcctgtcagtcgaacatcccccttcttgatgatggtgaagagcgaaaggataagccatctatttccagaacctaaagaggtttaggattaaaaaaaaaaaaaaaaacaagaaacaaaagctttcaattagctattcctctctttgcaccttgcccaggccagctggatggcttgtgcatctttgggaccctctgagaagattggagctcccagctaatgctagaactgctgaagtgggcaatctgccatctcgctaatccaatcagctccctgctcctcaaatctgatttggtttttagacactgagacctaacagctgggcacagatccctacaaattcccccccggggcagccaggggcctcacccttgccctgtggggttatctgataggattgcaccaggtccctcagagcgtgggctggctgctcactgtcgaaaagcacaggtaccctctcgtgacttctctggccagctcaactgggtggtgacaaattacaaggtaagtgagcagcaaacccaggcattctcagaaaccagagtggacatggggtgggagtctgggggtgggacaacaaggacagacatgcgcttctacatgtttgctggagttcgctacctctgactgccacaggttttgcttagaaaggaaacttggagggcatttagtcccaaaccatgagatggctttgcctatctgccagactgaggagaggaaacagatatgctgagtggaaagaaaggcctgcctggtggaactagggctcacatgtgcccctgacagctgcttttggggagcagtcatatggcatatttcaggaatattttctgtgtgcttaccataagccacagaaaagccaggtgtggtggtacacagatgtgattccagcactaggcaggaggattgccagtttgaggccagcctgggctacataatgagacaggaggaagaagaggagaagaggaggaagaggagggaagaaaaaatctagttatgatagaattgtttgattttgtttgagacagagtcttactgaataaccctggctgccctggaactcactttgtagtccaggctggcctcaaactttctgcaatcctaactctgcccctggcacgacagaattttagatacagccttacaagtacatgacaccaacatttaatcaaaaaagacaaaacaccattagaatctacctggtgaagtttactgaaatgcctgaagcttaccaagaaagacaaaacataccaaaatatacaatgggcccggcatggtgatacacacctttgatcccagcacttgggaggtggacttaggtagatctctatgagtttgagtctagtctggtctacacagtgagtttcaagccagccatttgagaccccatttgggtgaagcggggaactggggctggagaaatgactcagcagttataagtgcttgctgttctcccaaaagacacaagttcagttcccagcacccaggtcaggttataactccagcttcaagagatccaacaccctcttctggtctctgcaggcatctgtacacatgtggcacacacacacacacataaaaaaaactaagtattttttagctgtacactacagtaaagtacaactgatcggtgctggtttgatcatggatggatactggaacatgtgggaggaaatgtccaaaggaggaagtcacaggagtgggctttgtgtccagggcatgcataactttatgtgtgggatcattgtactttcatagccttccaacctctgacgtacatcccaagggacagacaacatggcagcctgcgggaagaccaataaatcccacgtcatcttcaagaaggtctctcgggacaagtcggtaagtggcacagaagagaggcttcttggaaattattgtaagattagtaggaagcagacatttgtcgcatataacctgatcaacatccatctaccatgaggcctagggaaggctggtgtccatgggatggacaatcggcgcgagagaaccaaggaacaacagtggatcctgcagcccaccatctcagtcccattgtcccatcccaacttcattattctttcttactaagtcgtgggaatacagcactggccacactagcctgcataactagcacactaaagctggtgtatctgtactatatctagccgggatacctaatgggcggtgatggtgcagatccgtttcattcttcaggtttttcacatgtgccctcctctgcccattcctctatcagctggaaatgtcatttccatcaagcctttgggtgctttgagtttatagcttcggggccctacatctgccattctccagctcttcctcccactgtgtctgtccagcccttatctccccttcctactttgtgctgacttctctgatcccctaccattctcccctccatccctctgatcctccaccccaccccttccctctaatacctaacaggcatccattatctatggccatgcctccttgaaatgcacctggtctttaaacagacattatgtgaaacaagaaatgtatttccttctttcctccctccttgcctctttttcttctcctatggtcctgggaaattaaacttagggcctcatatatgctaggctaccaccccaccactgatacatgtgtgtgtgtgtgtgtgtgtatatacacatatatgtatgtatgtataggtatatatatgtatctgtttatatatgtgtgtgtgtgtgtgtgtgtgtgtgtgtgtgtatacccatctctaattttacttctattttgagtcagaatctcatgaagtttcccaggctggccttgaacttggactcctccagctttagcctcctgagaaactcgggttccaggcatgtgcaggccctacttaggtttttttttcccccctggtgcaagggtccgagtggaggagaatccatcaattcatgttttgtgtactgggagtttccaatggcaacccttgcgtggcctagtcatgggtgcctggcctctgcaactgtttctctgctgttctcttctctgtgagatcctcaggctggtagtgagcagcccagctcatttcagtttgtggtttgaggataatggggcctggtagcaggaacatgaggcagtgatctttaggcaggaagcagacaagatgagtgccccttatggtctcttaaatgtcaggagaccttatctgggagctctccaggagactttcctcttatcttcactggttgagtctgaattacctaactaccctatgccgatcacaagccaaaggaattagatgctcagaactggatcagaccaatcaagaaacatcccttgagctggaagtggcagcacagatctctgattccaatactcgtgaggatcctaagttcaaggctagccagagctacacagaagcacttgtcaaaggaagtcatgcaggctggctggctggctggcctgctagagggatggctcaatagttaaagaacacctgctgcttcttcagatgtcctgggttcaattcccagcacctacatggtaactcacaaccattcataactccagttccagggcatcagatgccttcttctgacttctgcaggcaccaggaacataataatgcatacatgtaggcaaaagatttatacacatctaagtaaaatgaatacttacttaaagacttgttaaagtaaaagacagatgggaggccggaagagaagggtgaaaaaggaatcacccatttgagctggcctcctcttagcatgggatctcatgactgatgctggatcttgtgcatgattggctattttatccaagaaggtgtgcttagctatgcgtgagttgccagaagtctatccttcggtttcacaaggccacccttttccacctgttcctgtccctcccactcctttccagggtaataggagggtggtcttgctcccagttgaattcagagttgcttgctcctggttaaagctcatgatgtaccacccctggggaacttagtcccatccagtctgaactggatctgcagcctttccctctctatcagagtgtgagaacaaacaggccttagccaggcttgacagcacacaccattaatccctgtagtcaggaggcagcggcaagtgaatccctctgagttccaggacagccagggatacataattagacccgtccctgttttaagcacttacctcaaaccaaggtagcaacctggagaggtttcatctccattgaccaataagtgcaggggaggcctccacagccctggaagtggaatatgtaccaggacggggagaggggcagaccctgagtgttcctgtggcaccaggtttgaagacagcctgggctacacagtgtgttccagagcttgtgctacagagtgagagactcttatctcaaaataacacagggacagacagagcatgctgggatgcaggggacccagagtgccaaaatgttctcttaaagcatgaggagggcttcctcagctagaggtgtcactgtagagccttccttaccataggcaccagaagcagagaggttcctgctgtgatagtgctatggcagagctggcacggccttgggccaaggtgaggacagaggggctggagcccagaggtaaggataggttctattggatgttactccataggagggagggaagagtcacatctatgaattggggggggggggagggtagccacgttagggttcctgtgagaacggagataggtaaatctgaggagagtttatgtccctgggttaagactcacgctcagtcaccactgggaaaccttacgcccattcagtctggctggcctgggtctgtagcactgggtacaggtgctttcctgggctggagggatgggggatccagcagatatcagaactcagaagctgacaggacctcctcccaggaacatgcttagaaggctgtgccagccccaggccaggccggcaagcagggacaaacagcagctcccccctcttctctcctgctgattttgggtccatcctgcaccaaaagcagaagcccagggagttagccggacaagtcggctaggttagcctcaggtgagagccctgacctagagggtgaggcttggtgcctgctgcagtgccctttgcagtaatgggtcccagcatccctttcccatctcccacagcatcccatgcccagctcccacagctcccacactccccaggctgctgaagcctgaagaagtgctctgcacagatttgcaaggtttcgaaggggttcctctctgttagcagggaggtagagtcataggctggataccacctcatgcaataaataccaccaccaacgtcaggcatgcaaatggacccacctggggagaagggattcactgtggaagactgagtataagatgtgatttaatgtcgagaatcacttagattgtttggtgaaataaaaaaaaaaaaaaaaaaaaaacctgtacttgagaggcccagagcagcagagagctagccagcgtgcatggttttgctcattggcaaccttggcaaacacagactgaatccttctatgtaccaagagctgtagtaaatactgagaaggctggaaggtatatagaacactcaaggtcaaagtctctcaacctgtgggttgtgaccctcttgaggtggaaggaccctttctcgggggtcacttaagaccatcagacaacacggatatttaccctgattcataaccatctcaacattacagttacaaatgagtttatgggggctggtgagatggctcagtgggtaagagcaaccgactgctcttccaaaggtccagagttcaaatcccagtaaccacatggtggctcacaaccatctgtaacgagatctgactctctcttctggagtgtctgaagacagctacagtgtacttacatataataataataaataaatctttaaaaaaatgagtttatggttgggagggaggctccccatgacatgaggaactgtattaaaggggtgcagcactgggaagatggagagacactgctctagatcctcacctcaaggcatttgcaggcctctggtaacaaagcagcccaccacccccgttctcctaccaaatagctgaggagactggctgctgagaacatgggtggcatccctaccaactcgcaccacacccttcttcctcagtgtgtggtttccggtttacttgagcggggctcggctgatcacttttctggatctccttctcctttgtctagtccagaaagactctggatacagagacaagaccttttagcgcataactagaaacagaagggctgactgtgtctgtgggcacgaccttccgctaacctatgggttagcctatcagatttacctagttgcttaacagacctgggcttgagttgaggaggagagaacggagtgggaaggtttcccaccatccatatggagggaaagaattccttggagcccacgtagggatggaagacaggacactgtacttgaaatgaaccatcttcaccccctgcagggagagaaggacacccacagagcatctgtggagcccagcgacccctcttctgaagactaatggaaagggctgaggctccagggtagaatgcttgccttgcatgcatgaggttctgggttcaattcccagcactggataagaggaagagagacctactactgagaagatgttagggttgttggcctctgagtgaatgcctttgttctttctgcaggtgaccatctacctggggaagagagactatgtagaccacgtcagccaagtagagcctgtaggtaagttgagtttggaggaaaaattaaggttggttttcctctcagtcatcagactgctagtttttcattaaaaaaaaaaatgccagtaggggatggtgatccacgcctttaatcccagcactcaggaggtaggttaagaacactggctgctcttacagaggacctgagttcaattctcagcacccacacagcaactcacaaccatccgttagttcatctccaggatatttgatgcccccttctggttgcgatgtgcagtacatctgggtggtgtatatacatagatgcaggcaagcacccctatacatcaaataaaacaaatctttttaaaaaaattaatctcagccggttggtagcacacacctttaatcccagcacttgggaagcagaggcaggcagatctcttgagtttgtggccagcctggtctacagagtgagttccaggacagccagggctacacagaaaaacctcgtctcaaaacaaacaacaaacaaataaacaaactcaatagtaatctaatcaaataaatacaaataaaatatcagtgagtagccactgttggttagaaacaatttatgtctacatttatttatttatttatttatttacttggggtcagaggagaattttatggagtcagtcctctcacacctttgtgtggctccagggattgaactcaggttgccaggattgtgcagcaagcatctttacccactaagccatctttctggcctctccaaagaaaaaaaaaaaaaaaattaaaaggctggtttgtagctcagcgccacttgccgaatacatggccccaggctcaatcttcagtactaagggaaacaaaaggaaacaattcatctctctgcttcctgactgtgcatgcaatatggccagctgcttcaaactcctgtttccacattaccccatcagtatagacgtactctcaaacagtatgtgccaccaggtaagcaggtggtggcatcagccacttctcatatctccagaaccacccagactcttggaaacaccaggaatccaattatatgtagaaaaagaaactgttactaacgtgtttttctccacatcaaatcaatatgtttcaaattttccaaagcaaaagaaggttaagagaaccggttgtggcaatgctagtgatgctgatgatgctgaggcgctggccccatggaccactgggggaagcacacagtgctacagtccccaccccccaccccgggaaagcagctcagtggtttctttaagaactaaacatagcctttccatatgaaccaataatagcaccctgagtacttactgagaagtgaaaaatgcatacagaggacttttttggatgtggttgttcactgcagccccaaactgaaaagacgaaagtctctctttagtagacgaggaacattaaacaaaccgtggcacatccataccgtggactactattcaatcatagaaaagaacaagcagccagttttggagcatgcctgtgagcccagcacttgggaggctgaggcaggaggaatgagagtccaaaggtggcctgagctgtataggaacagacccttggggggggggggggagacagacagacgaggggtggggggggagaaaagtaaagagtcttagctattgatactgcaacctgctgggtaaaaagagcaatctcaagggggtgcagacttcttaattccacttacataacattctcaagatgacaaaagtctacagtgcttcccaggggctgaggatggcaggagcagagatgggtggttcgacacagcccaaaggagacctttacgatgccagaacgatgctacaattggatggtggagctcacacagatctccacctatgataaaacaacacagccgtgcacacccattgtgtacttaccctgaccccgtctaagcacgagaggcaaccggacgcaggatgccagagccctctgcaccagctctgcagctttctctggcttgctaagcatctcactggcaaccgtttgaaaaatgtatgggagggcggggagattgggggttttaaacactgaggataaaactgtcctcagtgggtaaggatgcttgctgccaagacttacaaccagagtttgatccccagaaccacattttaaaaatgactattcttagtattttattttatgtgtaagcatgtaggcctgagtgcgtgtgtgtgcatactacgcatgtaggagccatcagaggtcagaagagctgttggatcccctgaaactggggctacagacagatgtctgttgccacctgggtgctgggaacgcaaacccaggtcccgtgcaagagcagctagttctgttaactgccgagccatctctccaacttctaaaacaaatatttttcttaaaaaccataaaaagcaagctggatggtgaatcaggcctggaggcaggaggattacttgtttatgattatccttagctacatagcaagcccaaggctagactgggctatgtgatatcctgtctcagcctcccgcctccaaactgaaaacagaagatgccagaagtcctaacgacagatgccttgttttcctaatctcactctcctggtcttctttcctttgcttcagatggtgttgtgctggtggaccctgagcttgtgaaggggaagaagggtaagctaaaccccttgccccgcctcctggcgtagaaggttatttgtggatagaaggaaaccatgcttgttgttgagaggcaagggaataaatcccagagtttatttttgtgcttccttgcaaagttctgtgccacagtatcacagtgcccttgagatctctggcagtcgtgtgcggcaagccatttgtttctaatgacagttgcaaaaactgaattagaacagatttgagcttcgcttatgatgatgccgctgactcagttccattctaaatatgcctttggagtggttgctcctggcaaccgcaaggcattgttctaaactttggatgtacccgctggaatatgtcaggtgtgggctggtaacagggtctgggtgagaggggagcaaggcaggaaagacagaaaattgctctcttctgttttcccaccttcctgggagctctccagctctctggcttgaactcaaccagtccaggcttttaccacacacaggattcagccaccagggaaaaccacagcttagtgggtgcaggcagaaatccaggccctccatggctgcctctctcaagtcttcacctgtaaggaagggtgtaagagtgtcgagtggttctgaggttctggggcagctggcctcagaactgacacagaaggatgctcagtcaaagctgagggacttgaggtaccactttcaacaagccttattatgatgaaggactgtgcatttcctgtcttcaaagaaacttgaagtgaactttcacacactgggcaccggttccctttaatcagacagaattttgggaagttgtgatgtagaggcatgcctctgagcagtgcacaaggactacataaacgaaacttctcgcgtttgattctgtctccctgcctggcccaggcctttggctgttcccgcagcctccctgtggctcaggcacttgtctggtttgcttgcagcactgttagtctctccaggcatcctgccctccttaacccaagccagcaagttagcaccatctcagacatccggatcgatgagctggtggaccaggaggagggagggggaggagacagtaaggccaggtggacagtaatctgtccacacatttttcaatttattacatatttattcatggagtgcatatgtatgtccatgtgtctctgcatatgtacatatacacgtgggtggtatacaaatactaaggttcacgtgttgggggggggcagcttgtggcgagttggttccctcctgctaccatgtggatcctggaaattgaattttcgttgttaggcttggaagcagacgcctttactcaaccatcctgccaggcctgtccatagatttctaccatcctagcaaaataatatggttgccaaggagatggctcccaatctgtgagagtcctgtttttggataatgaactctaaccctaggaacatgctggtcctcccaaaatatgcccaccagctgcatagtattattctctaccccctccccctcccctccaccatttcttccaggcagcagagactggcaccctggtgcagacagcatggtgtggtctctctgttgctagctccatccagtgaaagtggctgaggtaaatgggcctgtgcagtgaaccaagactaacctgtcgcctctccttccccagtgtatgtcaccctgacctgcgccttccgctatggccaggaggacattgatgtgatgggcctgaccttccgcagggacctgtatttttctcgggtccaggtataccctcctgttggggccatgagtgtcctcacccaactccaagagagcctgctcaagaaactgggagacaacacgtacccctttctgctcacggtgagctttccttaccctgcctgctcccctggcttgcctccttcacccatggtaccttatgataggaacagagcaaagaggagggggcagaggcccacatctgttggcctgtaaattgcacccttgaaagaaattctagattgcatggtctgtgattgtctgtttttaagtctttgtaaatagcctccctgcctcagaaggcaccatttcaacctgccctttggatatttttcttcatctggcaacctaattagatgagtatgttctgtcttctctcattcactataaaaagaaactggtagatgtgaccctcagttggcctcgtggagctctactcaagcaagagtctgctatgggacaggaggttttggtagattgagtgccatcttttacctcttggcccctacccctgctcccctacatggtcctgggcatgaaatcagggctttactctgttccggtcacttctcccaaggcccatgtcacccagtgaaaccctctgtggctctttctgtttgcaatcctatcttattgacacatgctcttccaaagtgatgtggttcagcctttaaaaaaaaaaatcaagaagtaggtaggtggtggtggcacatgcctttaatctcagcactcagaaggcaacggtagagatctctctgagttcgagaccagcctcgtctagagtgagttccaggacagccaggactacacagagagaaactgttttgataaagcaaacacaaagtcaagaaacactgtctaagtcccccaacatggataaacccccaaaacatgatgctatgtgaaacaagacagacacaaaaggaaaaacaacatcttacagtcccacttccaggaagcagtgggtggagccctgttcatttagacagaaaaggagaccaagtctactggccggctgggagggggacggggaagtcaggttccggggacagagtttctctttggaatgctgggaaggtcctggagacaaagtctcgtgactgttctgggccagcatggacagatttacccccaaggaagcatatattaaaatgagctaaaatggtaaaattgtatggtattctattatatcacaaatgttacataaaatttctctttaaaaattattttgtcaggtacggtcgtgcatgcctttaatctaagcacctgggagctagagacaggtatatctctgaggtcaagaccacttagagtgcagatcttgatctagaatagccaggactatacagagatacccagtctcaaaaacaaaacaaaacaaaacaaaatgaaacaatatataaggaggtgtgcacatctatgctgagaacctgaagtggtaaaatttctttgcaatgcatgtcaaaaacctttagaggccagggatgttggtacatggctttgatcccagcattcagaaggcagaagcaggatgatctctgtgtgttcaaggctaacctggtctacatagtgagttccaggactacactgagaaaccctatctcaaccctggtcccaaaattacaaaaaataaaaacaaaaaaaatgttgcaaatggattttttttcctggctatcctgaagcttgctgtgtagaccagactcgcttcaagcttagatactcatgcctctgcctcttagagccatgggccaacatgactggctagaaatggggtccttaagtgctggaggtatagcatggtgctggaacatttgtgtggcatgctcaaatttggtcccctgcacagaaagattttttttttaaagcaacaaaagcagagagctagagaaatggctcagaggttcactgctagctgcccttagagagaactaagattcagttttcagcatctgaatggcagcttacaccaatctgtaactccagtttcagaggatccatcactctctttgggcctccatgaataccaggcacacatgcagtgtacatgtgcatgcaggcaaaacactcatacacataatatttagaagttaatacatctttgtaaaatgcaatgttttcagtcatgaacctcaacaatatatatgcagaggcaggagaattgaaagttcaaggctagcataaactaagcagagaaagaccctgtttccaccccctaccccaaacacacacacacacataaatttgattttgacctggtagttcacatagcattaattggctaaaactggactaaagggtttgaagatgtatatttactattgcattatttataatggaaaaacaattagacaccatgtagatgtccaacaaggggcaatggctacacgaagtgcactgtagaagctctaagcaccgtagagagaaactgtagtgcattgtgtgtaaaaatggtcagagggatgtctgaataggataagggctagtgaggttagtgaatcaaataatcagacacctttggtccaagtgaacacacccagacctgggtgatgaacacatgccccgggtgcaccctcatttgtgagtctctgtatatgctggaggtttttggaaataaatcagcattgagctggctgtcaggagagtgggagaattatgtgggttttttcctcatcttgtatgatggttttgtactacatcatagaataactcctctgaatgaaatgattgtatgtttgtccttccagtttcctgactacctaccctgttcagtgatgttgcagccagctccccaggatgtaggcaaggtaagttaaagaagaaatgccacaggttaccctccctcaataggcttttgattgttttgaggcgggctctgtaagactgaaactgaccttgcctacacctcccaagtgctggaatgacagtcatgagccaccctgccaagctttcaatagccttttaaagtagctttttatcattgaaaatgtcaaagatggtcaaagggcccagcataaagactctccaaccatgaacatccttgtgaacaagagatggaaccccctggctctcacatgttaacagaaagccacaggcaacaacaagaacacagaactgtaggacatattagatatggccacagacactgtgaaaaagcctcaggcttgtgtaagggagggacaatcgatggcatttaaagtcagagtccttattctaagaaaaggggaaagccagactctccagggagagaggccctggtacttgcagaggagggaacatgctaaacgaggggagaaggtgaagggtgggagccgaggtcagggtggaaggaaggcatagggtagccaggtcttgacaacttgggtttgagtgacatgggagccagtggaggggctgaagagcgggctctgattcagggttacaaagggttagtaatggatctgaagtcactcaaacatgtgctgtgaaggggaagggagggaaaagagggtgtgaccaagatggaccagggactccaggccagaggagaaggggataggtgctagcttgcctgggccccaagattgactgtgacagcgggtctgtgagtatggaggacagtgggcagcgactgatgatggagagtggaaggacagtgctcatcagtgcggtatcatcacccactagtggttcatagaacagaaatggcattttaaaaactgggatggcatggaagggcatagaagagaattgaactaaatggaataggaccatgcatcctgaaaaccatacattgcataccaaccacacatcacaaaggtcaaacaatgtcacgagaggggtttacacacatgtgtctgatttctataaatatgtcacactacaaataatacttctaaacatttgaatgccatggtccagggaagctgaagacagctgagatcaggggaaatgagggtcactcgagataaggggaccaggaactaagaaaacacaactgagccttgtcagtccatcattgctctttcaagggcgccttgaatcctggttcctagacgacctttccggagttttacagtcttgtgcagtctagagcccctcttatttcttctgttcttagaggggagagggtattaagttggtaggagagctcctgggctgggaacctccagtatcctagattggggacttggttacaattggaggcttgagggacacataggagattattaggtaacatacatatacacatataaatatataatatatacatataacatatgaatataatatatgtcattttatatatcacaagttacatgttacaatcttctacaatattatgtagcttatttgatgttattatattaataaaaatgacatatatactaatatacttcactatataatgattacatagtaaaatattatataacatataggttagcagaatataatatataggcagaaaatttaaattgttacgttactattcagttttacacagcagtaaagacagtgaatgcttcaagctagaggaaccccagagcccagtgaggcctatggaagtgtgtggcttgttcagagaccagcacaggatgggacagctaggtgggatgggtgggtgacagagcaggctgcctgcagcattttgtttacattgcacctgtttgtctacaacctgagaggtgctgtgttctagtctcaggaccgtgtcctaatgtcaccgttgacatgtggcattgggacacaagagggacacccttgttatgccttctttcagggcagagaccaggctgtgattggcctgcacggggagctaagggctggaggtcacagacagatgcacttactccatccatgcagacttaaaagtcctctttcattttgaaaacgagctcatcttactgtttcgccccattgagaaagaaaaattcaaccattcattgtgagccactgctgtttggccagggttggctttggaggagccaccaaggtctgagtgtttgcagcctgccaggacatccatagatacagcccccggtgccatgaacacttgtgtccttagtgctgtgtgcagcattaagtcagaaggttgtgcagggtcgggttgtacatttgtgaacaaagtagaggcatggaccttccaggactcgagaggcacatctcaggaggcatgtcggcacgcggttcttctgtggtggtgcttcatccctatgcttactccttgtgctggctgatttatgtcaacttgacacaggcaagaaccatctgataggagggagcctcaattaagaaaatgcctccttaagatcaggatgcagacaagcctgcagaacttttattttcttctgttttttgttttgttttgtttttgtttttcaaatcagggtttctctgcatatctctggctgtcctggaactcactctatagaccaggctggcctcgaactcagaaatccgcctccctctgtctcctgagtgctgaattaaagacatgcgccaccactgctgggctattttctttannnnnnnnnnnnnnnnnnnnnnnnnnnnnnnnnnnnnnnnnnnnnnnnnnnnnnnnnnnnnnnnnnnnnnnnnnnnnnnnnnnnnnnnnnnnnnnnnnnnnnnnnnnnnnnnnnnnnnnnnnnnnnnnnnnnnnnnnnnnnnnnnnnnnnnnnnnnnnnnnnnnnnnnnnnnnnnnnnnnnnnnnnnnnnnnnnnnnnnncggttgctgggatttgaactcaggacctctggaagagcagtcagtgctcttaacctctgagccatctctccagcccttattttcttaactagtgactgatggaggaagattcagcccattgtgggtggtaccatccttgggttggtggtcctaggttctataagaaagcaggctgagggctggagagatggctcagtggtttagagcactaattgtttttccacaggtcctgagttcaattcccagcaaccacatggtggctcacaaccatctgtaatgggatctgatacctcttctactgtgtctgaagatagctacagtgtactcgtatacataaaataaataaatcttcaaaaaaaaaaaaaaagaaagaaagaaagcaggctgagcaagccatggggaacaagccagaaagcagcacccctccatggcctctgcatcagctcctgcctccaggttcctgccctgtttgagttcctgtcctgacttcctttgatgaggaacagttgtatagaagcataagtcaagtaagccctttccttccctgcttgcttttttggtcatagtgtttcagcacagcactagaatgcgggattaacagcacacttctctagtagtcctcattggataggcccaagaaagacacagaaaggagaaaaactagggacagatatctacctataggcgtggcctgtgttctgttgggaggtgctgatcactataggcgtggcctgtgttctatggggaggtgctgatcactataggcgtggcctgtgttctgtggggaggtgctgatcactataggcgtggcctgtgttctgtggggaggtgctgatcactataggcgtggcctgtgttctgtggggaggtgctgatcactataggcgtggcctgtgttctgtggggaggtgctgatccctgtcctatctgttctcgtgcctcccacagagctgtggggttgactttgaggttaaagcatttgcctcagacatcacagatcctgaggaggacaagatccccaagaagtaagaggactctcgagggatttggggaggatcgggtggtgtagaggtggggataagaaatgctcccattttatcctggtgtgacagactcttcgagttggttcctggtggctggtgtcatgggatctctcagatcagggcagataaggcctgaactatctgctatgggggtggaggtggggggcaatggctactaatatggggtagagaacataaaagggaatgacagtggacttagcaacctcagggacccacaggcccccaaaccttcaaggccctttcattttcttcctatttatttattttctattttattttattttattttattctatcaagtttatttccaaacagtctctctctgtagtcaagactgccttagaactcatgggtgctccttctgcctcggcttcccaagcactggaatgccaggtataagataccatgtttctttttaaaaaacatttttgaacttatgataagatgcatacactatgaagtctgtgattctaatcactttgaaatatttgactccacaacactaaatatatttacaatgtttcaccatcaccagaagctaactcaaagcttttgtgccgttccaaacagaatctctatcaccaacaagcattactccacccactgggtgctcattttaaaaagttctttgagcatttcatacttatataccattcaatgatatacacccacttctctttcctccactggctcccccatatcctcccagcacctccccctcttagctgtgccttcttcttatttggtaactcactgtcactcctaagtctccacccaccccaacccttcccgcattctctcatgctcagcatccatatctccctgtgctcatgctcaatatccatatctccctgtgctcatgctcagcatccatatctccctgtgctcatgctcagtatccatatctccctgtgctcatgctcagcatccatatctccctgtgctcatgctcaatatccatatctccctgtgctcatgctcagcatccatatctccctgtgctcttgctcaatatccatatctccctgtgctcatgctcagcatccatatctccctgtgctcatactcaatatccatatctccctgtgctcatgctcagcatccatatctccctgtgctcatgctcaatatccatatctccctgtgctcatgctcagcatccatatctccctgtgctcttgctcaatatccatatctccctgtgctcatgctcagcatccatatctccctgtgctcatactcaatatccatatctccctgtgctcatgctcagcatccatatctccctgtgctcatgctcaatatccatatctccctgtgctcatgctcagcatccatatctccctgtgctcatgctcagcatccatatctccctgtgctcatgctcagcatccatatctccctgtgctcatgctcagcatccatatctccctgtgctcatgctcaatatccatatctccatgtgctcttgctcagcatccatatctccctgtgctcttgctcagcatccatatcttcccatgctgtgtgttttgctgtgtatctgaaccatcacatgtaccatgatctggtacatgccagacgagcactctgttcccaagctctgtgctttcgatgcttatgacagtgacagtgtgctacaattacgtggagctctaaagtctggtcacataaggtatctgaaaccatgacacaggctctcctgcaaggaggctaaccagagtctgacaggatgcaggggaccctaccagcattgctggctcagcattcaaacccctggaatcatagagatggggtgatttgaagcatttggggttgagggtgggcaccaaccatgaaccctgggcctttctttttctcctcaggagctctgtgcggttactgatccggaaagtgcagcatgccccacctgagatgggtccccagcccagtgctgaagcctcctggcagttcttcatgtctgacaagcccctgaacctctcagtctccctcagcaaagaggtgatcctcacccccctgaggtttagaccacagccccctcactctgtagatgcacacaagtcaccttgggtttgctctagtgaaagcatagatgtttgcaaattaccagcttatttccactaatttggagctagtcaccataagccactatggctttaccattgtacttgttggctctccccatagtctgggggctgtagagattgtaagtatacagccccttccagccaccttggctactcccggacattcaattctctgaggcagcattgctcactgtactactttaagttgttcactttcttggcaaattcagatttcatagaaaactcatggggcagccatgttaagagtgatgtcatcagtgaggagagtcatgggagtagaaggtgaagaccaaggctctcatggtccaaagtcaatgatggacaggttagccagagcctcaggtgctgtgtacacatgtgtgggcatggatggcacagggtgctgctgggtaaagctctgtcagccagcaatcctcgtgccttcggttcatttcacacatctcaccccccaaacaatgaagtcaaggcaggaacttccaagaaacccctgcctagggaatggcgccactcacagtgggtctggctctgaccacatcaattaacaatcaggacaactccccacagactaacctgaggtagatgatctttctcaagactctcttcccaagtgattctcggttgtgtcaaacccctcaacctcctcggcattctttctgcagatgaggctgaacatgttgatagccttctctagaggaaatgttatcagttaagattttctaacactggggtttgtcagccttatctattggaacgggactaaggaaatcttggtctggggagccctcagctcacagatgccatccattgtgctccgttcttctctttgacttctctctcactttgcagatatatttccatggggagcccatccccgtgactgtgaccgtgaccaacaacaccgacaaggttgtgaagaagattaaagtatcaggtgggactctcatctctatactgagactcggggctttctagaatccctcagcctcatgctatttcctaagacccactctagcctggtaaggccccaccccaacagtgcccttagatctgcctgttcctgttttcattgatagcagcagtttttgtttttgcttttgtttttgcttttgtttttgagacagggtttctctaagtagtcctagctgtcctggaattcacttaataaaccaggctggcctcaaactcaaagatctgcctgcccctgtttccccacgtgctcagagataaaggcatgcgccaccaccgcttggctgatagcaggatcttaaaaagagaaggacattagaagtcactacgttcgcctcagttggtaaagcatatggaggctctaggttcaatccctggcaccacataacttaaatggtgcatgcatagtgtcagcactagaaagatcaaggttggccttggctatatgtccatgttgaggccagcctgggcagtgggagaccctacctcaaaacaacaagtcatgcattcaccgccattgcctttgtgttggaagtttgtctctagcagatggccttcccgtattcccatggtcatgcctttccagagacacccctccgagccaggtctctcttggggagtccagggagaaccttcccccttttgtttttgtttgcttgtttaattatttaatgcatgtgggtgtttacctgtgtgaatggctgtttaccatatatgtgcagtacccgtagaggccagaagggggcatcagattccctggaactggagtcacaggcggttgttagctgccctgtgggtttggggatttaaaccttaaccatgaaccattctccagccccactttccgtttttggaatttgatagcttttgctgaccaatacagcaaggcactggatttgaaaatactgggcttaatctgttatgtcacccttaaatcccaagttggctcgttgtccaccttctcaggcctataggctaagtacaggtccccagcagtgctttcctgagtagtgatgtgtgacgtcttcccttgaatgagcatctaacaaaggtcagctctgttgtatgctgcagtggagccccccaccccccttactgatctatatatttccttagcccgttgtagcacacacctgtggtccatgctgtcaggcgacagaacggttgtcagcttgaggccagtctgggcaacatacctagcttttctctcaagacattaaaagtgtagaacaaaaccaaaaaagtgtaggtcctctgtgggcaaaacgaaggaagaaacaaaaagcaaagtggattgatctgagtgagcaaattcagacttcaactttcagctaaaacatttgctggccaagctgaggtaggtagatttacaacatcagagtaagtagtcataccaggtcgccctggacaacagatatgggaatttcagtgttacattagtcattgtaactggactgagcaagcaagaggctcaggagttcaaggtcagccacagcaacaagcagaggccagactagactacgtgaaatcccagttttgaaaaagctagagatgttgctcagtttgtagcttgcttgctgggcataggccaggtcctgggttcattcttcagtgtatacatatgtgcgtacacgagtgtgcacatatgtacaaaatagggtttaccccatgccaaccagttggttgtatagcccagttatctgctatcgtttgaatgtgctcactgtatgttcaagggtttgaaatttgatctccacattcacatgttaatgatatttgcaggtaaaactttgggaagtagctaaggtcagatggggttctgaggaagggcctataatgacactataatgacatgaagtaaagagacttaaattagccattaaatgtctctgccatttgaggtccttggctattatgatcaaacaggaaggcccttatcagaggccaacaccacttgggagttccagcttccagagccaggggctaattaaacctctgtgtattattcagctatagcagtgtcagacatacgttccactttccctgcacgtccactgaagatgaaagtcaggaattgtgtgcatgtatattagagaatctatggttttttttttcctttttgtgattatgaatattaatccagccttgttttatgttggtttaattctctatgggcctgagttattcagcatattgtatgcagtgccaatggcttccttgattggtgtagtagagtctatctgccccttcaggctgctatggcaaaaacaccataaactaggtggctcacacacactgagatgtgggcctcaaacgtgtgctcctcctactgctgccttcctagtagtgagttgcaggtgtgtgccgctatggccagctgacagcacacaggaaagttcaggatcagggcattggcagattcatctgacaagcagctcatccaacaagctcctggaacctccttgttaaggccacggattccactcatgagtgtgctgtccccacaactccatctttccagaaagcccttctcttcacagtgaatgctcacttgggctactgggatgagctggcaaaaatgccagcttcccagcctggtgccatgactttgatctctggaactcatgtaggggaaggagagaatgactttcccacaagttgtcctctgacctcccaacaagtccttgacatgttcgtggcctcctccagtgatgcaaattttaaaaataatgtcaccctggggttgtaatttcaattttgaaagaacagaagcaaactttcagaaacagctgcaaaattgattatgtattgtatttgaaattacttctcggggctggagagatggctcagtggttaagagcactggctactcttctagagatcctgagttcaaataccagtgaccacatggtgactcataaccatttctaatgagaccagatgccctcttctggtatgtctgaagacagctacagtgtacttatttatagtaataaataaatctttgggctggaatgagtggggccagagtgagcagaggtcctgaattcaattcccagcaaccacatgatggctcacaaccatctgtacaactacagtgtactcatatacataaaataaataaataaattttaaaaacaatttacttctcagcaaagtgtgttggtgcatgcttgtaacctagcacttgggagcttgaggcagagttgtgagttctaggccagcttgggttacacaggaaagcctttttcaaaattaaaaaaaaatatttctcaaagtatattggaaaataataccaatgaccttgaaacggtgaaattttctgaaacaaaatattagtagttttctataagttgggtactgtgatgggaacttgaaattgtttctcttaatcctcaagcttgattttaagagattatgggtttggaggagagaagggtgcttcctggagccgaatctcagagcccggtgttttggtaacgcagagtgagtcactggtatacagaaatggcctgcaaccagaccttgaaaaattgcagcttgaagccgagggctgagaaagccagagtcaaatggtcctgtgtgtctccttgaaggcacgagggctgccctgaccaccccactcctgtcttccctttgcagtggaacagatagccaatgtggttctctactcaagtgactattacgtcaagcctgtagcctcggaggaaacacagtaagtagcaggtgtctttccacttcctgggcggcagcccgctttgtcagcttcctcttctgaagagggaactttgccttttctgaaaagaaagcctttgctttcttccccctttctcccatcaagagctatgaagcaaggcaggctaggctatgtgtttattttgcctctgggtccatctcttaggctgggagaacagtctttataaacaagggaccggaggagagaaatctagagagtaaggtcactatgggaacaagaagggctctgtgtatccttggaatgtgttgacaggaatgagatgcttgtcctgcccccagaagatgactaaatgagctattagcccaggctagggctatgatatgtatgtgtgtgtgtgtgtgtgtgtgtgtgtatatatatatatatatatatatatatatatatatatatatatatgcatatatctatatctatatctatatctatatctatatctatatctatatctatatctatatatacacacacacgtgtgtgtgtgtgtgtgtctgcatgcatgtttcattctctctgtctgtctgtctgtctcccccccagcttgactgtcatggaagggggccctcaggctagaatgatagcctttactgtagcagaatttgcaggaagattacaccagatgtgtgtgtgtgtgtgtgtgtgtgtgtgtgtgtgtgtgtgtgtatctctataccatttcctgtttctcattcaaaactctgtgtgctttttggaccaaatgatcctcgggagaatggacaccattctaggatttcccgggggtggggggtgggcagagcagtctagaaatggggccatatcatgttagctttttcattgtttaggcacaggcacgtatctgagaaaacaaactgtcacagaaatatctgtttccattcacagtttctattgatcacagcagggtgggcgtggcagagcagaacagctcaggaaacaaggaatgcaggcattagcaggatacccctgctccccctttgatgacagccaggtttctagcctctgcaatggtggctcttgtatccagggcagccttcccctctgggctaatcttctctggaaatgttctcacagccacgtcctgagttgttttctctcatctccaaggcccttctcaaaaccatcccattacgactaaatcacattggtctcaatgtagaagccactcagaaggctgcaagagcctagcactgttccagacacatccagcaaccagggctctggtgggcaggcttcctcaaaccgggtcaaacatccgttgtaagctgctgctgaccatgcagtgtgagatcctaatggccctgaacacagctgtgggcctggcttccgcaggttctactacagtacaggctagcccaaaggccctcttctgctagaggagagagagagagagagagagagagagagagagagagagagagagagaacaccacaacccaggtggtaggatgtggccacccctagctcaagcaaaactttgtaagagtcttctgaactcactagaggcaggagaagcggaagctgctttaaactcccgggggttggggtgcaaacaggggcgtccttcccatgggagacagttcacatgtccagatgtctgggaactcattcaggaagtggtcctgatgctggctcccagccagcattgttgcaagccatactctaccttctgcctgcagcccaggcctggttgctaggatgtgcactgcagaatgaattgtccagcccagataccactctggaatcccaggagtgctgtgtctctagccaggtcccagaattgaccctcagagtggggttccttctgtctttcactcataggaaaccccacagccctctgcaggagccccagtaaagaaagaggggagccaagctgggcagtgatgttgaatacctttaatctcagcagaggcaggcagatctctgtgagttcaaggccagcttggtctacagagtaagttccaaaacagccagggctacacagagagaggagagaagagagaggagagaggagagaggagaggagagaggagagaggagagaggagagaggagagaggagagaggagagaggagagaggagagaggagagaggagagaggagagaggagagnnnnnnnnnnnnnnnnnnnnaggagagaggagagaggagagaaggagagagaggggagagaggggagagaggggagagaggggagagagggagagagggagagaggagaggaggggagaggaggggagaagaggggaggggagagagagagagagagagagagagagagagagagagagagagatatctttgaactgactgatcagactgacctgggttataagtggttacagacctatcagtcacacggtctatccttcctagtatggacagttttggctacagtggttctgtatcagcttctttgctgacactgcccacagtgggactcaggaaagggtctctttatggctgtgtagatcaggatagccttgaatacacagagattctcctgtctctgcctctcaagtattagcattaaaggacaatgccactacactcagctagatttttagtgagtttcatttgcttctggtcttgttgtttttgcttttataagacagactttcactatgtagtccaggctggtctagaactcatgatcttcctgtctcaatcttctgagtcttgggattaccagtatgtaccaccactgctgagtattggtcttatttaacctcacagaacatttcagaggttttcgtaattcagaacaagtcaagaggcttgagggaatgaatgtcccaaccttttgtgtatgctgtgtgtgtgtatgtgtgtgtgtgtgtgtgttctgtttgtgcctggtgcctctggaggccaggaggaggcatttgattccctggaactaaagttacaggtggctgtgatttaccacgtgggtgcagagaactgaattctggtcctctgcaagagagtcaagaactctcaactactgagccatctctacaccttacattttttagacaaagtctctcactgaatttggatctcagtgactgagcgagactagcaggcctatgatctccggggatccatcttctagctctccagtggttgtttacagacacactgaacatggtagcacagggcttccctcaggactctatggcacatgttttaccaactgagccatctctccagccctgaagtgtcatagtcttgctgcccctcaggctcaggactaacagcatgtctgtttggtaagggaaactttcactctaaaaatgcccacggcaggtaggatcttgagatgttaattaatggtggccaggacaaggtattaattgtgactgtcacagccataaaactctctatgattcttcctcaagagaaaaagtgcagccaaacagcactttgaccaagacactggtgctggtgcccctactggctaacaacagagaaagaagaggcatcgcgctggatgggaagatcaagcatgaggacacaaacctggcctccagcaccatgtaagtcctggatgctctgtgaatgggtcacccgtgcagggctggtaccgggcttccccagaggctcacaggcaggcatatcagtaatgctcccacttccactgtggcatgcatgatgttatagttgcccaggctggctctgggcatagccttataccaaccatagtgtcactgcctgccctctgggtgaccacggctaagttccttgagctctctgagaaccttagttttctggtctgtaaagtgggagtaatagcaaattccaatgtcacatgctagtgatgaagactaattggaacaatgtatgtaaagtatggtgcctgaacacataacctgggttgttgtatttggctatttccattcattcagtttccatctggaaagacccagtggctacggatacgtaccagattttgttgaaaagaggagctgacctgcctattctgttggagaactgctagattgatttaggcaaagactatagggggataatctctgcagtgaagccagttgctagctgcctttctaggccttgtttgctgcgagattataagctactaaccgctgatggtgtgaggcaggagccaagacccaggcttgcagcctatatactgccctctcccataggatgtgcagggtgctccttcctggccccagtaggctcccctcagaggtgatgcccaatgaaaaaagagggggagtgttctgaccccccagacagacctgtagcttacattctgtgaggctagtagtggggacagtgaatatttggcagaatgaaggttagaatcaaggggttttctgaggataatttgccaactgcctgtgttagattctaaagcatgtttgagaaattccagggaatgaaaactgatgccatacatcaatttaaaggggccaatgaactgatgccaattcttacacgcgttcacgaccggccaggaagaacacagcaaaccagaatcttctgcgtcaaaactttattgcttacatcttcaggagcaagagtgtaaaccccccattgcttacatctttaggagccagagcgccagagtgccagagcgccagagcgcagagcaagagctctattgtttacatctttaggagcaagagagcaagcccaaaaacaaaagcgaaaccccgtccctattaaggagagttatccttcgcctaggacgtatcactccctgattggctgcagcccatggccgagttgtcgtcacggggaaggcagagcacatggggtggagaactacccttggcacatgcgcagattatttgtttaccacttagaacacagctgtcagcgccatcttgtaacggcgaatgtgggggcggcttcccacagccaatggcatacccttctgcaaagagttcattgttaagcaagtccactctaccctggctctcccactcaggaatatggtggtgagaacccttgaagtctcagacatgttctgttccctgtgtttgggtcttccatatagcacaagcttacaggccaattccagcaagagcatggcctcaggtcctgcctccgtcctcccaccagagatgatactctttggggagtgctgtagtcttagagcacatgatccaacagaaggccccgggctggacacagttctccgtgccttcaggcatctcttttgagatttctgttggggttcacagtagcttatagatttcagtcattttccatcccataattcctgttgtgagacatcataggatacttaagtcttccacgttgggtcataggagataatagtctgtgacaaaatgtccactgaggaaacatgactatattcatggagcctggagttaacccttcactccgtttggtcacacgtcactctctttggtcacgtgtcacactccttgtccatccatttgagtgggctttcccttggtgtcaggtgccatgctggttgctgggcacacagagcttttgggtgcgacccagaacaagcctgatcctgtgatcaagtgataggcaagcgtctctgtgcctttcttatgagtagagtgcaggagagctgggcccagtgctacctggctgagtctaggctttacagctggaggtgttagggtgcacaaaaatgagaaggaccttttgggtgggtttgacgtcagcaaggttggtgctcatggttcctcagggcagagctgggtaggatatggcaaaggcatttcattgaaaggatatttcaaagactgtttgctgaagttggaacctgaatgggttgaactctctggcttcagaacctgagggctcagcagctgcagcatggtgtgcagtacaggagacagggaggagacaggagagtgatttaggtcagaggctgagctccgaggaggacagatgctgtgccctgtgtgagcaccctagggaaggatgcagaaaacccactccccagccccattaatggatgaagttttaagacttgaaggtaatccatggagttctccagttctgagacaccatcttcagaatgatggccctggcaggcaaaggaatggttctcaccctggctctgttctcataacccctcttctttttgattgggtagcatcaaggagggcatcgaccggaccgtcatggggatcctggtgtcataccatatcaaggtgaagctcacggtgtcggggtaagtgttgagtgtgccatttctgtcttctcagtgactggcaggtggatggcaaagtaagcccgaggtacctactgatgcctatgtagagtttagcatggttccgtgtgtcagcttctgcagttttgtttggaggcaatgtatactgggaaagcaaaccaaaaggtgtgcaccatgagaaccgctgtacgcaagtgggtgtacatctgcacacacagtggaggctgacagaccggaatggcatccagaccccctttgtaaaagtaaattgccttgctgggttaaaaataaaaaaaaaaatgacatcaatttaattttcaaatttcagaaagatcagtagctgcctaatgaactctctgtaaatcttcctttatttgggttcagtgtcggggcgtgaaccactttgggaggctgaagtaggattaagaagcagtgtgatacatagtcactggctttggttttgttttttaaattggggcttagttggtatagtgcttgcctaacaggcaaaaagccctgcctctgatccctagcaccaaataaaccaggcatggtgtgtgcctgtaattctacattgcaagctagagacaggaagttcagaagttcaaagttatccttggccagaaagtttaaggccagactgggctacataagaccctgtcttaaaaaacaaaaactcaagtacggtatgctgatgtacacgcttgggaatcctgcttcttgggaaatttagttaagaggattgctataaattctggtatatcagggactaaaaaaaaaaaaaaaaggttgtttctatcttagacttttccctcccttccttccttccttccttccttccttccttccttccttccttccttccttccttccttccttccattccctaacatgtaatcagagaattagggggttaccttttcatacaaaattactgctattgagagttctaaagaaatggcttccttttaaggactttgtaagttttattttatgtgtacagctattatgcctgcatgtatgtaatgcacatgtaatgcataccttcagcccctgtggtagggaggcagaggcaggtaaatctctgtgagttcaaggccagcctggtctacatttcaggttccaggccatccagggctagagagagagaaactctccttctctcagaaaacaaaacagaaaaagaatagtctgtgctcttagccatctttccagccacaagagtccactactcccccccccctctttctctgtgtgtgtgtgtgatcagtatccttactctaatcaaaacagaagaaattgaattcccattttcctttcccccattttcctttccgtgtccattcccaagtgtgcttgctggccttttctcttgaccaggctgtgctagcctggtcatgagaggctccataaatgtccctatttttaagtagggagagagttgcccaactttgcttggctctgcttaaagtggtatttatatttcttggctttttctttttctttctttcttttacacacagtcgcactatatagccctgactgtcctggatactcctggtattttcaaatcagattttttttttctttcctttcccctctatgatctaaaaacaggataaagcttcatcttacagtaaatataaataataaataaaaaaatgagtgcaatacagttgattttccatgtctttgaatactgtatctttaatttcaacaaatgacaaattgaaaatacttgggggaaaaatagtttctagttcaatgccagccacagctacattgagagatcctgtcttaaaaacaagaaacagcaacaaaatgtttctgagctggatgtgtgcaggcttctcaccttgtttattccttagacagtacaggccactatccctaagacatcgtaaatgaagtagggatggctcagagtctagggaaaggtatgtgtgggggtcatatgcaaattcagtaccatctactgaacacactgagactgggaacacccccaccagggatcctgagatcagtgtaagagagacagggacagctgtaacagtgcatccctgaggcctctgctctgtgactgggagctnnnnnnnnnnnnnnnnnnnnnnnnnnnnnnnnnnnnnnnnnnnnnnnnnnnnnnnnnnnnnnnnnnnnnnnnnnnnnnnnnnnnnnnnnnnnnnnnnnnnnnnnnnnnnnnnnnnnnnnnnnnnnnnnnnnnnnnnnnnnnnnnnnnnnnnnnnnnnnnnnnnnnnnnnnnnnnnnnnnnnnnnnnnnnnnnnnnnnnnnnnnnnnnnnnnnnnnnnnnnnnnnnnnnnnnnnnnnnnnnnnnnnnnnnnnnnnnnnnnnnnnnnnnnnnnnnnnnnnnnnnnnnnnnnnnnnnnnnnnnnnnnnnnnnnnnnnnnnnnnnnnnnnnnnnnnnnnnnnnnnnnnnnnnnnnnnnnnnnnnnnnnnnnnnnnnnnnnnnnnnnnnnnnnnnnnnnnnnnnnnnnnnnnnnnnnnnnnnnnnnnnnnnnnnnnnnnnnnnnnnnnnnnnnnnnnnnnnnnnnnnnnnnnnnnnnnnnnnnnnnnnnnnnnnnnnnnnnnnnnnnnnnnnnnnnnnnnnnnnnnnnnnnnnnnnnctatctctcaagattttaaatgtattttgagagagcttcccactgcctctgcttcttgagaggactggggcctcaggcatgctctgccaccatagagtggctgaaattttctggttgtggcttatgttcacttctaagtgaatccactttttaagaaatccttgggagaaagaggagaaacccacagcaggaagcagtgaaactgagcactgagaggccccatgctccagaggacttcggggaatctgtgctagggagtgagagctatgcctaccagactgggttggggactgtcctgcctttgaaccctggggtctgacgtagtgtgggctctggggacttaccatgaatgtctgctttgtgctttctagctttctaggagagctcacatccaggtaagcctcctcgtcgtcctttcccttctctactcagctccctgcaagtggagtatgcggagcttgcagccaagcagaaactggtaaagaccagtttctgggcagcagtgctcaaagataatgtaatgacacagttgctgaaggtttttaataataaaagaaaaagaacatcataaatcaaggtattttaaaaaacacattggtgggaacatcaggcggacagggtatatcggggtagggaaatctctgctataggtactgtcttggttggtggcatttttagatttggggctggtggaagctaggggtctctttgtatatctcccaaacgatataaggatgtcaggtcaaatacaagggtaggcaataaatggctaacaacgtctaatgatatactatgaaaactgcaacatttccaccctccacagtcacaggatttctgatcagtcagtcattcagccttatagaatttttaacaaagatgtagcatttctttctttctttctttctttctttctttctttctttctttctttctttctttctttttttctttctttctttttttctggaaactttagttcccagcagacacttgaattgtttctaccttttggtacatatgaatagtgacagtgtgtgttttgaaccacggacaaagaatcaagaagtttgagacagacattcacctgacatagttcttttcctgggttcttatcatctgcttccatctcctgggcctaccgtgcagactgactgattagcatctcttgtgatgtggggagttggaatgttgcaggtctggagctcaatcattctggcctatatttttactgcccacctctgtgttttacctgacatttcatctagatctggcctgtacctgggtcactgtaagcaggtcaatgctgggtaggctgcaggggtcctgggatgcagggcatagtgtgttatctcatcccctctcttcacttctgttcataattcctctggatttccctttggctaacttcctgaccttcccttcccttcccttcccttcccttcccttcccttccctcccctcccctcccctnnnnnnnnnnnnnnnnnnnnnnnnnnnnnnnnnnnnnnnnnnnnnnnnnnnnnnnnnnnnnnnnnnnnnnnnnnnnnnnnnnnnnnnnnnnnnnnnnnnnnnnnnnnnnnnnnnnnnnnnnnnnnnnnnnnnnncccctcccctcccttccctccttccttcctttctttttatttttatttacttattcaccttacattctgctcactgccctcctcccgctcacctcctcccacaatcttttcccccatcctcccttctcctctgagtgggtagggaccccctgggtatccccaactcacctttcctttcttcttttcgtataaattctaatgtgtcccagaacatttggtcttagagatgtggtagacactaccttgcctcttctgcaagagatgggtgtgcccgtctttgtaccagcttcacagagatctttaaaatattattgtggttctgagggactaagagattcatttccagccttgtggaaacataagtataaagagagtaacgtatgtcctacagcagaggttgaggttaattctgcccgctttagtttttacctgatggaatgatgtcctgaagtgtagtcccgctttccagattgtctgacaaccatgcccttccagagcatccagccatggtgcatagtttggctttgaatgcttagaattgttctgtgattctgttgagtgaatgaagagtattgctgcacatgatggacaacagcagggagagtttgtgcaggcataaaaaggaggtactgctaggcatggtggcacacgcctttaatcccagcacttgggaggcagaggcaggtgaatttctgagttcgaggccagcctggtctacaatgtgagttccaggacagccagggctacacagagaaaccctgtctccaaaaaccaaaaaccaaaaaccaaaaaccaaaaaccaaaaaccaaaaaccaaaaacaaaaaacaaaaaaaaaggggggggggaggtgctgtggctggagagatggctcagcagttaagagcactgactgttcttctgcaggtcccaagttcaaatcccaacaaccacatagtggctcacaaccatctgtaatgagatctgacaccctggtgctgtctgaagacagctacagtgtactcacagtacattaaataaataaatgaatagggctgggacactgtgcttccagtttggtttccattactgtaggaactctctgcttattataacaattattattttaagttatttttatttaattatgcatgtctgcatactacttatgtgcctggtatccacagaaagagtgtgttagctcctatggaactggagttaaagatggttttcgaaccttcttgtgggtgctgggaatcaaagccaggtcctctggaagagtagtcaatgctcttaacgatccagcccctcacatacaaatttaagatgtattcaaatgtgtccttgctgcagtgaatagtcttattttgttttttatttcattttattttaaggtgtatgcacacagatgcaatcatgtgtgaagtccagaagtgggtgttagatcccctggagctggaatcacaggcagttgtgagctgcctgatgtgggtcctggaaactgaaccagggttgtcttagtttggggtttattgctgtgaacagacaccatgaccaaggcaactcttataaaggacaacatttaactggggctggctgacaggttcagaggttcagtcctttatcatcatggtagcatccaggcagacatggcactccaagagcggaggcttctacatcttgatccaaggtcagcagcagcaggaggagggtctctcttccacactggatagagcttgagcaccaggagacctcaaagcccacctccacagtgacacacttcctccaacaaagccacacctattccaacaaggccaccactcctaatagtgccacttcccatgggtcaagcatattcaaccaccataaggatcctccggaagagcagcaggtgctcctaaccgctgagccacctctccatctccatgaatcatttttttggtaaccagccttcttgtaggatatcacctcttctcttcccactgtgtcacatcatttcagctaggatccggagagctagaagcgctggctgcctcagccacgcctgaatgaagttcctggaccacattccagggaataagtttcaaattcctgcctgaccacttcctgaagtctgctttcttttgcatctcactaaatgaatcttttggagattctctgcagccctggttttgtgctgtgtggtctgtaactctgtgtgtgtgtgtgtgtgtgtgtgtgtgtgtgtgtgtgtgtaagcacatgcgccgcatgtgtctgtttatacactcaccagcctgtattcttccttttttctagtgaagtggctaccgaggtgccgttccgcctcatgcacccgcagcctgaggatccaggtcagtcattgccattgtctaggatgcctctcatccatttacctctggcagatttattaggcactaatttatccctggctttccttgactatctgtctgagcatggtgtcatccacagggtgaccaccagatcagcctagaagagagagccggctcacctactcagtcctgggcctgcccaccttctatctgtgtgtgaagggtgtagcactcctaccctctgttgggtgtgaatgacctagtgagatttttatcagtgacccagtcagtgcataagctctgctatccacaggtctcaatttagatttagagatggtgtaagggacaaatcgtttgaagggcctgaggctctgctttgtgtaggaacaggaggcctctcattttgtagtgtcaacaggcatttaaaaggtgctacatagttttgaaagtagtgatagtgatgagattacagaaaacacttaagaggtcagcctggtttcccaccacctccggtccatttgatgatctgtccactgactctcgtgtggatgttagacggagcaatcattgcacatatctctgacacacggggactcccttgttgtcactacaaagatgtgaatgggatgtagtatgagccatagctcaaggaggttccgagaaaaacagttaaatgaaggtaggtgtgctagaatgcctgcaatcccagtgttcggcaggctgaggcaggaggatggcaagtttgaggtgaacctaggctataatagcaagtctattagaaaataatttctcaaagtatctttaccaaatattttagattagacccctcagtggactttgccacatgctagtctagtcgtatgttttgctcatttatatacagctcactaaatgctagtttatgcagttatttggaactaatcaggatgggaatccaggaaaacatagattcaagaggtcttttattttatttttttctttattttttgagacaggcctagctgtcggttgcccttgaaccaggagatctacctgcctctgcctcacagtgctgggattaaaggtgtgagccaccaccacctggccaagcagcaagcagtctctcttttttttttccttttaaagagttatttactatatgcaagtacactgtagctgccttcagacaccccagaagagagcatcagatcccattacagatggttgtaagtcaccatgtggttgctaggatttgaactcaggacctttggaagagcagtcagtgctcttaaccactgagccatctctccagtggcccgaagtcttgaaaaggagctctttaatacctttcttccttacattcttcaatccttcctcccccccatctctctctttgaggaatgaacacagcatttcacatgttaggcaagtgttctgctactaagcttcattcccagccattaataataataataataataataatattattattattattattattattattaatttttaaatggtgcgagattcagatgttctgattcccttcaaagaaattgaaaatgcagtgccctgagatgccatagtttatgttgggttgctttctggaattttcagtagaggtgacttacattggaagaagtagagtttttctcctttctcagggtattttcagtcattatggaccttaggttagacaactcctcatgtctggatgaagcagtgattttgtgtgtgtgtgtccttaagatttcagagttgggactgagagatggctcagtggttaagagccatcttgcagaggacaggctggattcctagcacccacatagccagctcacaactatctgtaaccccagtttcaggggatccgataccctcttctgaccactgtgggtacttcatacactggtgcacagactgacctacaggcaaaacattaaaacatgtaaaataaaaataaacataaaatcctaataatgaaacatttcagtgatcaggagttagcacaaatcactcatggctgcaaaactctgatttcctgagatttatgagtgactgtgctttctgccttccatcttaccggtctgcttcctggggccctgagtcttggctggttagcttctgggcagagagtgcagtcattacttagggccccccggaaccaggacccaggcaatctgttcccagtatttgctgtataatgctgcctggcttttattgttcctttcagttgtgggttgccattcttgtggtctacctctttaggctccaggtccctctactcagcagaataaaattctagggtatcctttgtgaagagaagttttattttatcttaaaatttcattgtaatgagggttgaatctaagcctagaatgtccaggcaagtgctctaccactgagctatctctccagccttctttttgttattttgagatagagtcatggtggcacaggcttgatatttcagctaccgaagggctgagcaggaacattgtaagttcaaaacctgtcccaaaaatttattaaaaaaaaaaaagattgagaggaccgaagttcaaaggtcattctcagctataaactgagtttgaggttaacatgggatacaaaagcctcatttaaaaaattaattgggggggctggtgagatggctcagcggctaaaagcactgactgctcttctgaaggtcctgagttcaaatcccagcaaccatatggtggttcacaaccatccgtaataagatctgacaccctcttctggtgtgtctgaagatagatacagtgtacttagacataataatacaaagatcttttaaaaaggttaattggggctgaagagatggctcagtggttaagagcactgactgctcttccagaggtcctgagttcaattcccagcaactgcacggtggctcacaaccatctgtaatagaatccgatgccctcttctggtgtgtgtgaagtacagctgcagtgtattcacacatacattaaataaataaataaataaataaataaataaataaataactgatcgtcccctctctattctctctccttttctgggcttacagcaaaagaaaggtaagtcatctggaagcttctctggggtttcctgtgacccccctcgtccccatacaaattcctgtccgaatgtctgtgcggagtccttgtgtccttttgctcctaagaatgtaagatgtgtgcacacatagctatgttggacgtgtcttttgttctgtgggttctgttactttcccccttgtgtttatttgataaagagcttttaagtacagtcttggctaggagtgttgggttacctttaatccaagcacatgggaggctgaggcaggagaatcactgcaacttcaaagccagcctgggctacagaatgagactgtcacaaaaacaaaaagaaaaaaactgagggtggtggtggcgcacgcctttaatcccagcactcgggaggcagaggcaggcggatttctgagtttgaggccagcctggtctacaaagtgagctccaggacagccagggctacacagagaaaccctgtctcaaaaaaaccaaccaaccaaacaaacaaacaaacaaaaaaaaaactgaaagaaaacaaaacctctaaaaagccctgaagaaaaaggcatggtccttcttccatccagggaataacatggtccctcttccatccagggaatgacatggttcctctttcatccagggaatgacacggtccctcttccatcctgagggctgaacacattcatcttggattggttcctttactacagaaagatcagtggtcttgtttttttagggttttatcctcagcttctgagagtaagcactgattaacatgttgtctgttttcttctagtgttcaggatgaaaatttggtttttgaagagtttgctcgccaaaatctgaaagatactggagagaacacagaagggaagaaagatgaggatgctggccaggatgagtgaagacttagcctagatgcctagaaactgcttgtagttccgggtgccttgagggaagcccccggtagactctcaaagttatgctagatatcaaagcatgagcattcctcccagaaataaagtctctgggtcctcttatcatgtgtcaggttgtatggctggggcactgggctgttttcacttacatagagcctgatgcctttagggtctctggagcctgagagtgaggagcaacatctagaagaaagggcagcctttcacagagtaactcagtgctactgtgatctcgtgttttggaggtgtgtgtgtgtcgggggtgggggggacatcagggcttctcagccatgcttctctggatacacgtgggaccaatcctagctccagggccctttcagaggctcctgagttactagagcagaaaacaagtatagacaaaaatcccctcatgactccactttggggtctaatccctcctcaagctttccatggctgatcaagttttttctatttgacacaagtaacgaaccagatttggttaataaaggtgggcagaacagaaaagggggtctgtccctggagtgtccaaaaaaaccccaaaaaccaaaaacaccccccccccaaaaaaaaccctgaactaaactgaggaagtacctgggcttactgccatactcagtgtgggtagaagctatgaaggtcctgggaactcagctcagaagcttggactggcacccagaaagccattctgtacctaaccattgctgtctgggttctggatagcacttctgggaaaagagaatttgagtagcccagcattggcttggtggaccagcatctcctggccagcagtggccaggcctggaacaggtttatcaagacagatggacttcatgatcatattgttatgacggagaggaggagtggagaatgcttgtggtcagagaaggggaaggaggcacaacaggggctctttcaggccctgtcatttagaaggccattcctagccatagtgtccagaattctatattgtaccaaacagttctcttgacatccatggaagggacctgtgtgcattggggtgtgggaggaagatgggatggatagatgattctcatctatgtttaatgagtggataggaagagtggagatttctgtatagttcagcctactcactaatggcagagtgtacatgtttgtaactaattactttcctaactgttgtgaccaagtacctaacaagattaacctaaggaagtaaggttttattttagcttatggtttgaggcagtagagtccattgtgatgtggggagcatgaagaagctgcagctgtggtcagagagtaatggatgctggtgcccagcttgctttctcctgattgtttcagggtaaatcccctccccttggttaaacctccttagaaataaataccttcgtagattctaaaagccacccaagttaacagtgaactttcaggctggcgtgtgccatggtgcttgggattttggtgtgcaggcatagctgggatccttacactgggtgccacacagacgaagcaagtcttggtggacccgtgtgctgactttggggtttcctagtactgggagaggtgagaactcatttctgaagctatgaaaatggtaatatagttagaaaattgcgggttggtgggggcggacacagacacagtctatctttcttctgggggcagggggtagggcattgtcatagtgcccaggcaaagggatggcatgcttttggggtagcccacatggtacttcctcatgatctctttcccctgcctttcaacaggcaatctgcactggttagctcctggtgggtggaactgcctgccagccaaggaggctgggactctgccttgtagctcctggtgagagaaccatcctgttggttcctgcattgcttgaccccaggacatcctaagtcagagtggacattaataggcccgacctttggagcagtgtgggtgagagagccaggagggaagggccaaagcctgagccctggagactagaggtcagaacagcccttgtcctccaagttatttctgtgctaaaacatccaaaacaggcctccaggtgctgggttgtttatatactgcagctgcagagggagtgggggcaggaaacaagcagccagctgtcccagcaagactgctagtgtgtgtgtgtgtgtgtgtgtgtgtgtgtgtgtgtgtgtgtgtgtgtgtgttttactggttctgctgtatgaatgtgtgtgctactggctctgttttgtatgtatgtgggtgtgactggctctgctcagcctgcacatgtttctttgctggcatgcagaaacctcagaagacaggaagtctgagagcaggtcgaaagtgtggctgggttttggggatatgtacgatgtagaaaacaaaacaaaacaacaaagcccaaacaaaacaaaacaaaaaaaaatgtacaaggagttgagtgtgttgcacaaaggagcatttgggacaaagttggaagaacttgatggcaagcactttcacccattgcatcatctggtcagccctaagacacagtttttgggctttttgtttgtttgtttgtttgtttagaatcacatttatgtgtgtatttaagtgtgtatgtatagatatacacttgtcatatatatgtggaagtcaggacagttttcaggaatcccttctctctggtgtcctggggatccaactcaggttgtcaagcttggcagccagtgctaactgagccacctcaccagcccaggggaagcatctgggacaaagttctgcatccagcaaccacaggctggaaaagcacgaattcctgccatttattaaatgcctgccttatgctgggcacaccacgaatgacacccagttgctccaacagctgataccaccacccatttgtttggtgagaaactgcagttcagagagattagataggggagtgtagagggtcagagaggataggaaagtgtttataattaaacagtggctgctctttagttctttgaaaatgttagacacaattgcctttcacatgtagttgtgagatgtgacagagctctcatgggacatacattaagaagtggtctcctttcacaaagcaattgtagtacaatattgcagacaagtgcttactatagtgtagtcccctatccagtttgagtctctccagtcttccctcttctcctgtgtgaatctacttctctgtcatttttttttttcccacacagagactcctttcggagctgttgggtttcctgctccttagacatgttttactgcctgctttcccattcatttcataggctggatagttaacaggttgcagggtggggcggggcatgtaggggtggaagtcatgcacatctgtgtgtgtgtgtgtgtgtgtgtgtgtgtgtgtgtgtgttcgttcttttggttgttacaaatgccctgggagccagggaatctctctgtcacatgcagtgagaagctgtcctgcttaatggagaatgagggtcatcccaggttttcaggtggaaacattcatgccaggaggttctttctgacaagatcggccctcttccttgcgtgtcactgagacagatgaggttggatgggaggtgtgttattactgccaccttggtgtgccctccaggtggggtaaactcagggcgcagcagcacatcattagacatgattcattgtgtgactcacgcagggagagaggcaccggagggaatgcgttcttcctagccagccggtcttgggggagttgatggctcagcccttcctgagatctccaagggaaccacactgtgcgtttaccagggaacaaaagggctgcttcatgtgtcaaaaaagaaaaaaaaaaatcatgttcaagttctgtcttcagagcctaatgtacttattttcaaggtgaatacccttctcccaagcacattttatttcaaatagttttaggattacagaaaactgagcactgaagcacccacactgtttcccctattattaatatcttacatcatcagtgcaatacagtggctgcaccaagtgaggtggcattgacacattattattaaactaaacacatactctgttcggatttccttacccagtggcctttcctgttccaagatcatgtctgggatccatgtgacagtcatcctgtctccttaggctctttggttgtgaaaatctccagggcttttttctaattgcagttatctgtccgtcctcccatctgcccacagtttctccctgctaactgccattgctgtcatggttcttactaaaaaccataaactccagagttcagatgtaccctgagcctccagcagcaaacacacgtgacttctcaagccaaacctatttatttcttcctcatgtcttggtgcttttgctgatgacactctcccagaagaagcccctcatgggagggcatccagagtctcacttcccttttgcactatgagcagcagttggtcatcttcttccttctgctttgtctccagttatcatctctatctctaagactatctatgacattagacctagccgggtcaccattacctagggcggttacaagctctttttagtgccttccctgcctctaatccgtttttaacccagggtataattctaaatcccggtgcttgaggagctctgcttccctccccttctcctctttgtcttccttctttcagttgggatagggtctagctaacagtccaggatgacctcaaacttgtgaccctcctggcccagcttcctgcctggcattaatgacctcatcttaacatagttttctttgtttgttttattccttttttctttttatagtttcctttttatatatttaactttttaaaaaaggatatacattcattttagatgtatttattattatatgtaagtacaccgtagctgtcttcagacacaccagaagaggttctcattacggtcagatctcattacggatgattgtgagccaccatgcggttgctgggatttgaattcaggaccttcggaagagcagtcactgctcttaaccgctgagccatctctgcagcccctatgtttagctttttattctttgtgagtttcacattatgcaccgcagtcccactcatctccaggttcctgtccctttatgtagccctttgcccttgcaacaactaactccctcccccaataaaacatgtataaacatataacaacaaaatcaaaacatagaaaacatctctttgtggaaagctgtagtgtgtcacagtgtgtcccagagtatgtccctctgtcaactcttgttcacttgcaaatgttcattgcaatgagtcactatgggtctgtttcaagatctctggcttctgtgatactatcaatattggatcctcctcttgattatcctgttgttgtcctgtgtcatggtgatcttgcagctttggaacagcaggactggcgatttcacacgtcccaatcatttggagatgatataggttttggggtgggccaattcagaaccctggatctggacctggctggtagctgagttggtcagcccgccacctgctctctcttatccacacaaccagggccagttctcctgcactgctccagctagggcacatactcctgctctcaggccctcaggccagctcacctgcactcatgccaccagagcccactccactgtgctgcccaatcaaagtgtgggagccactctcccaagggctgcagcctgtgaggagcaggggccagctctgctgatctcatgatctcacatgatctcacatcctcagggctggctcaccgtgcctttgccatcagagctggctctgctttttattttttttcctaattttctttttatatactgtcctctttttgttgttgttgttttgctaaatacttttgtttttttgagacacggtttcctctgtgtagccctgtctatcctggagctcactctgtagaccagtctgcccttgaatgcagaaatccacctgcctctgcctcccaagtgctgggattaaaggcatgtgcctggccaatactttttacaattgaaaattttacttagtgcgtgtgaatgggcatgtgtgctatgcacaagtatgtggttcagaggacgatttgtttttgctttgttttcatttccaccatatgtgttgtagggattgagcccaagtcatgggccttgagagtgagcacctttccttgctgagccttctcaccagccccacaattaccttttaaaaacccaccctacagatactgtcacattctgagggcccagaggtcaagacttcagtaatgattcatgggaaacttccttcggccacatacactctgcctctctgcccatgctctacttatgaacttcccccaggccttgacttcctgggagaccaaccctgtagtacccagacagaggaaatcagttggtctgagttcacatcctgcctccctagcatccttaggggagtgatacctgagacttccatggcaggggctccgtttccttttggttcgtggggtatagctgagggctgtgtgtttcatcctgcatgcacaggagctcagtatgggcagttgtcactatcaagtgctatagaatctgtctgtgttagaagtacatacactatggtagctgccaagccatatgaggccattcagtgctgcaaatgttgactagtgtcactgaggaactgaaattttgttgtttttgttttctttgagacagggtctcctctgtgtagccctggctgtcctggaactgagtctgtagatcaggctggccttgaactcagagatctgctggctttggctcctgagtgctgggattaaaggcgtgcaccaccactgcccagcttggttctttttctttttctttttctttttctttttctttttctttttctctttctcttttcttttcttaaatgtcattctttagcctaggctggtactagttaataggaatttaaatataagtacttgtatgtagccagtggctacagcataggtggagtgtgtcctggttcatccaggcatctcagatctttttcacaaaagtcatcctctgtactggttgggaggtcagtatcctggcctcatctttgtgccagattaggaacctcctgtggttcctggtggtatctgacttgtattgccactagaatgagttgtccagttgtccagaggcccaaagcttgctgattggtgggtctccagcagcagcctctgaaagggtgaagggatagccaaggtggtcctctgctgacttgcctcttagagcagagcagagcaggaaggtagcacattgtcctggttggccccaagtccttttccatctcaatatgcccaaacaaaacaaaacaacaaaaaaacaaaactccaaacggaagccactccttttctaactgcatagggtcctcctttggctcagagttcattctgctatgtctctctagtaccccatccctcccttctgaatctcagttcccttctctatctctcagccccagccagtaattcagagtgcctatttgccttaatacttcatagatcctccgctttgtgacccagccaggctcagcttatctacctctttactcccccaactccaaccgggtttcttgctgccctcaggtctcagcagaaaaggccaatcccgtatctggtcctcagagcctcgatcccaaagctctccagttcctgtcctagtcccattttcctccctctaagcccctctaaatcccttccttcctttcttttttctttttgcctctgggcctttgcacagatctagcctctgcctacaacacggttccccggttctccatctttccttaacagtagccttaacagaagttctccctctgggtgtactttcacgcactctgtaaactgtttcaccaacatagtccagcggcctcctagagatcacttacactcgggtatgagtgataaaacagtgtactcagagacaaaaactagaaattgtgttccaagaagaaaacgacagaagacatcagaaggaaagagatgggtcaggccgaaacaacccagcaagggcccggcaagcctacgtctgcgcccnnnnnnnnnnnnnnnnnnnnnnnnnnnnnnnnnnnnnnnnnnnnnnnnnnnnnnnnnnnnnnnnnnnnnnnnnnnnnnnnnnnnnnnnnnnnnnnnnnnnnnnnnnnnnnnnnnnnnnnnnnnnnnnnnnnnnnnnnnnnnnnnnnnnnnnnnnnnnnnnnnnnnnnnnnnnnnnnnggcgcgcgcccctcacgccgcggtccctgccgaggcccgtgaccgtgtgcgagcggccgcccaggccctgccgggcccgaggtcctgcggtcgctgctacggggccgagcgcgccgcggcttaacggaccgcggggaccgggccgcgaggacggggccgcggggaccggtctgcggggactgggcgcaggtgggcgccgccgctgaggagaccgaggcccggcgtgctgctggggccgctgcggggaccgctgcgggggccgcaggcgcgtgctccccgaggcctgggggtctgtaggtctgagcaccgggtgcagcttcccgtactcacctgcgtcaggctctccctccactgctcagcccgctgcggggtcctcacccctatgtcccgaaagggaagggatgcgcgtgtagtggcctcttctccctctctccctccctctcttcctccctttcaccctcctccctccttgggaaagccgggactcctcacccgctgggctcagaactctctccgtggagaactccagccgctcgggttgcagtgcagagagacacatgcctttttgttgtctttccctaagaataaagttgcaccctttgcttttcctttctggttcctcttgaaaactgcgtatggtttcttgtcgaggtgagccctccttgttggaagggcttcctcaggcaggtggctggacaggtggtggctagcaggttgccaccgtggggcagccttggtagttccggctggcacgggcttgctcatcctgctgcagtgcgcttttcctccgaggccagttagttaccctttactggaaaaaccatttcttgcttgatcatctgccaccctctgttacttgccggggttggggattggggtgccatttaggtgctgacgtggtccatttgttatgtggtacccaagtcgttcagcacacgggacctaacacctgtgttattctagctataacaattacagccccaggaacaagtttaaggagccttgatactaatggaaatgccctttcctagtgcttggtccttaagataggtagtggtgtgaggcagatcagactctgtgactgaggggaatggtgagtgaaggccaggatcgcggtggggacggtggactcctccgaaattgcattgagtccagagttttattggtcaggaggtgtctccctgcctttcctctggacaaaaacaatagctgctataccagctgttctggttgttgttgttggtaggagtgacagttgtggtgttaaaaatacacccgaggacttgtgttctgaatacattcacatctgctgtacagatagctcaaggctgatttttcttctgggttgctagagcttgttaagaagtgggaaataagaagtttactgtgtgcaataacttccctttgtagcagagaggccattcacaaagatttcctggtaatatgtgtgtggcatataatgctaagttccaaatggtgtgatcagaacccactcttactgtttgaccagaagagcttagtgcaggggcgctgtgacacaggtgctgaagaacagagagggagctgcattgaggcagttcagagccgaggccattagcaggaagccactgctaccacccaggggtgggggaagaaggtcaaagggagaagaccacatcagactccagggccaatgggcccctccagaaactgggtcagaggagtcccatctgtcagagctctgggagggcagagctgctgctccatatatactaatcctttgcctgggaatcctgcttgtaagggtcaccccctctgcagtttgaaaacagaggacggaggatgggtcagagggccctgatccaggatcagagctggatgtat

SEQ ID NO: 56 - DNA, 1500 bp, Mus musculus
gttatctgataggattgcaccaggtccctcagagcgtgggctggctgctcactgtcgaaaagcacaggtaccctctcgtgacttctctggccagctcaactgggtggtgacaaattacaagccttccaacctctgacgtacatcccaagggacagacaacatggcagcctgcgggaagaccaataaatcccacgtcatcttcaagaaggtctctcgggacaagtcggtgaccatctacctggggaagagagactatgtagaccacgtcagccaagtagagcctgtagatggtgttgtgctggtggaccctgagcttgtgaaggggaagaaggtgtatgtcaccctgacctgcgccttccgctatggccaggaggacattgatgtgatgggcctgaccttccgcagggacctgtatttttctcgggtccaggtataccctcctgttggggccatgagtgtcctcacccaactccaagagagcctgctcaagaaactgggagacaacacgtacccctttctgctcacgtttcctgactacctaccctgttcagtgatgttgcagccagctccccaggatgtaggcaagagctgtggggttgactttgaggttaaagcatttgcctcagacatcacagatcctgaggaggacaagatccccaagaagagctctgtgcggttactgatccggaaagtgcagcatgccccacctgagatgggtccccagcccagtgctgaagcctcctggcagttcttcatgtctgacaagcccctgaacctctcagtctccctcagcaaagagatatatttccatggggagcccatccccgtgactgtgaccgtgaccaacaacaccgacaaggttgtgaagaagattaaagtatcagtggaacagatagccaatgtggttctctactcaagtgactattacgtcaagcctgtagcctcggaggaaacacaagaaaaagtgcagccaaacagcactttgaccaagacactggtgctggtgcccctactggctaacaacagagaaagaagaggcatcgcgctggatgggaagatcaagcatgaggacacaaacctggcctccagcaccatcatcaaggagggcatcgaccggaccgtcatggggatcctggtgtcataccatatcaaggtgaagctcacggtgtcgggctttctaggagagctcacatccagtgaagtggctaccgaggtgccgttccgcctcatgcacccgcagcctgaggatccaggtcatgttcaggatgaaaatttggtttttgaagagtttgctcgccaaaatctgaaagatactggagagaacacagaagggaagaaagatgaggatgctggccaggatgagtgaagacttagcctagatgcctagaaactgcttgtagttccgggtgccttgagggaagcccccggtagactctcaaagttatgctagatatcaaagcatgagcattcctcccagaaataaagtctctgggtcctctt

SEQ ID NO: 57 - protein, 407 aa, Mus musculus
RTSQGTDNMAACGKTNKSHVIFKKVSRDKSVTIYLGKRDYVDHVSQVEPVDGVVLVDPELVKGKKVYVTLTCAFRYGQEDIDVMGLTFRRDLYFSRVQVYPPVGAMSVLTQLQESLLKKLGDNTYPFLLTFPDYLPCSVMLQPAPQDVGKSCGVDFEVKAFASDITDPEEDKIPKKSSVRLLIRKVQHAPPEMGPQPSAEASWQFFMSDKPLNLSVSLSKEIYFHGEPIPVTVTVTNNTDKVVKKIKVSVEQIANVVKSDYYVKPVASEETQEKVQPNSTLTKTLVLVPLLANNRERRGIALDGKIKHEDTNLASSTIIKEGIDRTVMGILVSYHIKVKLTVSGFLGELTSSEVATEVPFRLMHPQPEDPGHVQDENLVFEEFARQNLKDTGENTEGKKDEDAGQDE

SEQ ID NO: 58 - DNA, 59196 bp, Homo sapiens
gatggcttgggtagtaataaaataagtctgtggctctcaaattctgtaatctggattgtaccccatttcgcaaatggggaaatgtttaacagctcagcaagaagttatcctcgtcctagagtcctgggcccatctgcttcagcactgcctgccacaccaggcccacagggacaggcgtgacactaaggtgtgccttcaaaagtgaatgggctgtactcctccgcatggctttttctctcgtgtcctgctttaataagtcctgcttacgttagaaattcctatttttcatctaaaaaactttggaaatcccggcactttgggaggctgaggcaggcggatcacgaggtcaggagattgagaccatcctggctaacacggtgtaaccccatctctactaaaaatacaaacaattagctgggcatggtgtgtgcctgtagtcccagctagtcaggaggttgaggcaggagaatcacttgaacctgggaggtggaggttgcagtgagccgagatcgcgccattgcagtccagcctgggcgacagagcaacactctgtctcaaaaaaaaaaaaaaaaaaaaaaaacaacctttggcaatcttgagtaaaatgaggtatgcctgtatctgcatagattctgtaaaagtgcatgaggtatgtgatgcctgccagtgaaagataggactaatcacaaaatgattcttagctgcctcacttaagcaaaatttgacttctctggcctccaggaactctggctttcctaacaggtctcaacccttcctggcctgtttgttccagatcctccctctctgtgcatgctccaactgttcctgtcctcttaaccttccccgctccttagtgaagcttccccggcaccatgttgccttcatattctaacctgcaattggcgagcacagtgagaacatccaaaccaggacaaatgcagaacccaagagagtagacagtattgtctctaatgagtccagtgttcccaccacttaacagccctgtcagtctcagtcagccctctttgatgcttccccccagggtattttaacgcaaatttcaagcatgttgtcttacccataaattaccatgcatcccaacccaaaccggcaaaggtacctggctgtgattaacctactggaattaacagtgacagtatcacgcaccctccagtccaatgttcctaattgttgcagcactgtttcttatgatgggtttgaaacaaaatccagttagcttttgctgcgtaacacactacctcaaacttcatggcttaagactgattatttactaagattctgtgaggcagctggcctggcctagtgggaacggatggtggaggtggctttgttcacatgtctgctggggggactgctggcacagcaagcaagcaagcaagcatctgtgtgtaagcaagcccttgtcactctgcttgggtcactttttttttttgagatagagtcttgctctgttgcccaggctggagtgcagtggcacgatcttggctcactgcaagttctgcctcctgggttcacgccattctcctgcctcagcctcccgagcagcaggaactacaggcgcccgccaccacacccggctaatttttttgtatttttagtagagacggggtttcaccgtgttagccaggatggtctcgatctcctgacctcatgattcgcccgcctcagcctcccaaagtgctggggttacaggcgtgagccactgtgcccggcgttgggtcacctttttaacgttccatcgtctaacgtggatggcacaggcagcgccactgcagtgagagcacagcaaggggaacggggcggccatctcggcggctggctgcagcagggtctacatgctgttcccccatcacctgagtatttattctagaacagtaattcttgcggacctttttttgaatgccctacactggatgtggttgacttctctgtaagcatacacttacgtctcaagtggggacattagtcttgcacatgactgtgggcccagcccccactgtggattgctctgaccccaggcacaggaagatgacggcaggcaaattctgactttgggcttcatttttgtcagagaactagtgaggagaggataggtaggcatgcttgtgagccaggcagtaagaggatcaactgtaaacagcctggcttctagttaggaagccataagtcctgttgcccccagaagtacacccggatggtcataagagactaaagagatctcagggccatcatatgctttacatccgatagagtgcttagcacatggtgggtctatagtagtagaattagtggaaaacaaaccaaaacagccccaagattgtcccaagatataactagctgaaaggaagagaaaatcgtttaaaaatgtaatagtaggccaggcgtggtggctctcgcctgtaatcccaacactttgggaggctgaggtgggcggatcacttgagaccaggagttcgagacatgcctgggcaacatcatgaaaccctgtctctactaaaaatgcaaaaattagccgggtgtggtggcacatccctgtaatcccagctactcaagaggctgaggcaggaggatcacctgagccccaaaggtcaaggctgcagtgagccgtgatgatgccactgcactccaacctgggcaacagagcaagaccgtgtctcaaaagaaaaaaaaaatttgagattcacataacataaaccattttaaagtaaacaattcagcggcatttaataaatccacagtgttgtgcaaccaccccttctaattccaacaagaaagaggatcagtgcttttcagacttttctgatcagtagcagtggatctgtctgaagaaaacttgcaagccctctccccagaaaaaggcatatgtacataattctgcatgcaacttaggttcacagatcccgaagcccatccagggatcccagggtaagccctcggtttgtggttggctctcaactcttctgtagaagcaacctcatcgtcatcagaaccccctttagtgttggggcccaggtggcatgaccagagggtgaagaagcacacaagatagacatcagcctcaccgctggagaggacgagaaaatcttgatcaggatcctcctgcacaagacttgaccttctgaaggccatctgcacattccataaatctttccaccttgcaagacaaggcaggctggggggtcccctcagacagacggataaaggaaataggccaggctactccctcaaggtcacaatggattcagcagtaggccaagaacccaggactccatctggggctgtttgtacatcatgctcctattacatgggaacctgcaacattaagtaccatttttagcacgatgcctccagacagacattggaaatctgtctggggtgggacctccagggtggtgagagggtttcagtgcctacaaggctaatcatggaaggattcacgtgtggaagagagattaacttcgagcaatggagagaagcagaagggaagccaattccatcctaacataatttttcactctttatactaataatttggtattagtaaatcataatttactaattctaataattagtaaataatactagtaaatactaataatagtaaatactaataattagtaaataatagttttgtcactctttatgctatttgaaaaaaagatggatatacaacaaagtagtgatttccccatccttggaagcattcagtaacttattggggatgttaacagaggagatcaaagtaagggatggaatgggaacaaagtgattttttttaaaggtctctcattaccttgtgcacccacaggattgcgtttatgatttcagatattattagccagcccaacccaaaacagccctctattgtttaaactgattgactaagtctaggagatacatgttggaaataaggtgacttttaaaagctccgattccctggcactctttatagatacctcaaacctcccaggtgttctctgcttcagtaaaatcaaggcaatgaggacacaagattttcattttgtagctgatgtttagcagagtgtacccattttcctcgtgcatgtgccccagtaaacccttaagacgacaaccccaccccaaagcccataagcctcttagctggatgtctccaccccgcccccacctcccctgccccgcaagccggctgctgtgtttagtgtttggagatgaaacacagggttcatagcattgtctcactggaagccaaccccagagaaacaagcatgctatagccactggttcccagactttgagaattcatagaccagtaattcgcaaaaataaatctaggggaagattgccagcttttaatgtttgccaagtaaggacttttttctaaactaccatatactcttggttattatttcataaaaagaaaggacatttttctccttatgcttaggagctgcattttgaaatacgggtaaaatgtcatgatgtctgcatgtacgttcaaatagttaaaaaggaaaaaaacagagatagacacagaggattgcaggcagcaaaatgttaagtgtcaagtcttgaagttgactgtgtgggtgtctattgtattgttcttctaacttttctgtgctttaaaatttcataataaaattgtagaaaatgcagagctaatgacagaaggcagatctgtgattgcctggggcaggagcgtgaatggaggagttgatggaaatgggtacagggaactttggggagtggtggaattgatcacagtgatggttacacaatgtatatgatgaccaaaactcatcaagctgtacactcaaaatgggtgaattttgttggttattaaatagatatattttacctctctatatgtatctgcctgcactcatctatgtctgtcactatttcaaaattcacccgtttcatatatatatatctcaataaagatagagggcaagaagaagaacaatgccttttttttttttttttttttttgagatagagtataactctgttacccaggctggaatgcagtctcggctcactgcaacctccacctcccaggttcaagtgattctttgcctcagcctcccaagtagctgggattataggcgcctaccaccacacccagctaatttttgtatttttcgtagagaaggggtttcaccatgttggccaggctgctctcgaactacttacctcaagtgatctgcccgcctcggcctcccaaagtgctgggattacaggcgtgagccaccatgcctggctgaagaaggatattttaataccaaaaaattaaaaagctcataatctcaaaaggacagtcctttatattgaataagtttggctcccagaaaaactacaagagtgtccttatttttctcatttctccaccaagaagagaaaaaatcatcacagaccaagagttgggaataacatttccaaaaagagtgagatctgtcatccagtccacccaaatttccccacctgcacggcattggcagagcagtgactaagatctgcagatctgtgccttccagcagccgggaacgatgaagcagcaggagaatgggggaatctggaagcactcacagctgcaaactgggcctgggtcctgcagcctcagctcagggcagccctctgatggggacactgaaagaagcaccctagtcattttttcccctttgtttttttttttttgagttggagtctggttctgttgcctaggctggagtgcagtggcacaatcttggctcacttcaacctccatctcctgggttcaagtgattcttctgcctcaaccttccaagtagctgggattacacacatcaccatgcccagctttttttttttttttttttttgtatttttagtagagacagggtttcaccatgttggcctggcctcaagctcctgacctcaggtgatccgcccacctcggcctcccagagtgctgggattacaggtgtaagccaccgtgcccggccacagcaattttttttttgcccacgctggaatacagtgacatgctcacggttcactataacctcaacatcccaggcccaaacaatcctctggcataagccaagtagctgggaccacaggcacacaccaccaggcctggctaattttgtttactttttatagagatagggtctcactatgttgcccaggctgttctcaaactcctgtgctcaagtgatccacctgcctctgcctctcagagtgctcagattacaggtgtgtgccactgtgcctggccctatttattgttttttgtttgtttgtttttttgttgtttgtttttgagacaaggactcgctctgttgcccaggctggaatacagtggtgtgatcatggctcactccagcctcaacctcccaggctcaagccgtcctccagcctcagccttccagagtgctgggattacaggcgtgagccaccacacctcacttatataacacagttttgtattttaacctttctattataggagcagtaaatggtcataggagaaaatgtgaaaaattatagacaagaaaattgaaacaaagcctaccatttcattacaaggtaatgagagacctttaactaccaatgttagcttaaggtgtattcttgcaaagtatgcataggtatagcatgcatatgaacctgcatgtatgtgtgtaaatatgcttgtgtgtatatgcatgtgtgtgtaaatgtacatatatgtatgtatacacaaatacatagtctctgtgtgtttgcaaaacgtggacatgctaagcacaccattctgcagtcttgttggttctgtcacaatctctcacctttctactccaggcattttaccatagtcagattttcccaatgaacccaaaatgtcctacacatcctttttgaccagttgtgtattcagtctggggctgcacatgacatctgggtctcgagtgtcttagcgtcttttaatctagtaaaccccatgtcttttttcttttttttttttttttgagacagagtctcgctctgtcacccaggctggagtgcagtggcacgatcttgactcactgcaacctcccctcccgggttcaagcagttcttctgcctcagcctcccgagtagctggaactacaggcgcccaccaccacgcctggctaatttttgtatttttagtagagacggagtttcactatgttggccaggctggtctcgaactcctgaccttgtgatccgtccgcttcggcctcccaaagtgctgggattacaggcgtgagccactgcacctggcctacccatttctatggcattgtttgttggatttgtctggctgctcacttgcgtcacgtagctcgttccttgtatttccgataaactagaaatgatgtctgaaggctcatggattcaagttaacccaaggggacacatcccatgtggctgacaccaccagcaatgctaagattgaccatggcatctgccgtgcaccttgtgatgacaccatgatccgtgtggcatcacttcactcctacagtcattttcccagcaactcttcacctaatggttttagcaccaatgaataatctttgtgttttaaaatagggggtttgcagttcaggtatggtgaggccaaccatagagtatgctaaggatagggtgacattgaagtaaagactcaaagccattgaaggagtgagccatgtggctggctgtgggaagactgttccaggagaggaaatagcaagtggaaaggcctagacggaggtttaaagaaaagcaggccagtggtggtggctcacgtctgtaaccccaacactttagaaggttgaggtgagaggatcagttgaggttgggagttcgagaccagcctgagcaacatagcaagaccccatctctacaaaaaggttaaagaattagctgggtgtggtggcatgtgcctgtagtcctagctactcgggaggcttaagtgggaggagcgcttgagcccaggagttcaaagctgcagtgagctatgattgcaccactgcactccagcctgggtgacagagcgagaccctgtctctaaaagaaaagaaaacaggctcagtactctggagtgaagtgggcaagggagagggtggtgagaaataaagtcagaggtaaaggggggccagagcatgccggacctggcaagcattgtccagacttaaatgggaagccattggaatgtttgggtggatgctgataccccaaacgtcagaacaggctttctgcatatacttgtttcattcccaagtcagtcccccatgtaagtgtgttagtggtcgcagagtcccctccatccattccctgagtgttcttgggagcaggcattgttctgggcactgtgaagacaaaagtgaaggaaacaaaatggcctaggccctgccctcatggagcctggactccagtgagggaagagagactgtagaataattcccaagcaagagtgaaatgtggccaggcacggtagctcatgcctataatcccagcacttcaggaggccaggagtttgacaccaacctggccaacatgacgaaaccccatctctattaaaaatacaaaaattagctgggcatgctggtgcacaactgtaatcccagctactcgggaggctgagacaggagaatcgcttgcacccaggaggtggaggctgcagtgagccgagatcgcgccactgcactccagcccaggcaacagagtgagactctatctcgaaagcaaaaaaaaaaaagagtgaaatgcaagcgtgcctccaatctggtcctggaggttggggatagctcccctgaggaagtgactcctggtcaaaaatctgaaaggccaagaagagtcaacaaagtggagagaggagaggcttgttccaggcagaaataatagtgggaaggaggaagcgtggcagacggcgtggaaggaaaggcaggcagaggttccagaggctgcaagctttttgcctgcattctaagagcaatgggtgattgtaagcgagggatgacagggctcagaaggtctctctgcctctgtgtggaaaagggcttggagggtagaaataaatgtggtcggctgggtgcggtgactcattcctggaatcccagcactttgggaggccgaggcaggtggatcacctgaggtcaggagttcgagaccagcctggccaacatagtaaaaccctgtctctactaaaaatacaaaattagctcagtgtggtggtaggcgcctgtagtcccagctactctggaggctgaggcaagagaatcacttgaacctgggaggcagaagtttcagcaagctgagactgcaccactgcacttcagcctgggaggcagaagtttcagcaagctgagactgcaccactgcacttcagcctgggagacagagcaagactccatctcaaaacaaaaaacaaaacaaaaaaaagaaaagaaatagatgtagtcagacagtggggaatcactccggtcctgagaagcaaaggcggtgctggggatgggaggatgcagacaggttccagagacactgaggggatcaacaggactcctgaagccatcaatcagtaggaccgggtggaggagagggacagatccagcttggcttgcataacaccaggttcatcttgaggttgacatttctccttgacctttttgtttagtccccacccgcaaggtcgcattagctgcctgctgagtttaatcaaatctcttcctgtcctggcaatgcccgggaatgaagagataatcagtctatttccagaatccaaagaggtttagaagaaaaagtagctttcatttagctgttggccctcccaccaaccttccccaagtcagctgggtgactcatacatctgtgagaccctccgtatggagaccggggcggggggtgttgcttaatgcttagaactgctgaaactaccagttcactgtctcagcactaatccaactctgctccttaagtgggatttggcttttagacattgagacctggatgctgggcatcctcgctagatcccctacaaattccccacatacgtaggccaggagcctcagcggtgccccttcaggctcatctggcaagacggtaccagcttgctcagaacaggggctggctattcatcatctcagagcatagagaccctctccttgccacccggcccttcccacctggttggtgacaaatcacaaggtatgtgaccaccacaggccaaaaccttatcagaaacctggggcaggtgtggggaagagcaaggatgggcgttttcctgcagacagtatgtcccgccttcaccttttctgtgtggtttccataagacttggttgctatttaaggagacttggagtgagcgggtgcaatggctcatgcctatagtcccagtgactcaggaggctgaggctggaggatcacttgaagccaggaattcgagaccaacttgagcaatacagtcagacccagtctctacaaaaaaacaaaaataaaaataaattagctaggcatggtgtcacacacctgtagtcctggctactcagctggctgaggcaggaggatcacgagcccaggagttcgaggctgcggtgagctatgattgtggcactgccctccagcctgggcaacagaacgagctcctatatcttaaaaaaaaaaaaaacctcagagtatgcttaattctagaccgctaagatggcctcttaattgtaaaacagagtggctatctcttagtaggaattgccaaatagaacttttgggattttaatatattctttttttttaaaaaaagtgataggatcttgctatgttgcccaggccagtctccaactcctggtttcaaatgatcctctcgcttcagcctcccagaatgttgagatgacaggtgtgagccacagtgcccggccattaatatcttcttgaaaacagtctttgcgaagtggttatgttgtggttttcaggaacttttctgatttattcgccattagacacagtcacgatagaactttaaattcaacctggctaagtgtgataacaccaaaggttagtcagaaagtaaaacctcattggaatctagctagactccctggcaaggtgtactgagaaatgtttgaagcttaccaagaaaaataaaatattgaaaacaccccaaagcatgctgcagtaaaatacaaactaagcaaagactcaccgatgaaactcggatgttgaagccggtacaagggcatggtgaggacgcacaggatctcgtgagtaggtttcataactaggatgttcttgacttgatatttaggattgtcttacctttctccaaccctctaacacctgaccaacaccccaaggtggtagaagttgccagggacagataacatggcagccagcgggaagaccagcaagtccgaaccgaaccatgttatcttcaagaagatctcccgggacaaatcggtgagtggtgcacaagtgagtgatttgatagaaattattgtttaaaaaaaatggagctttttcaagtacagtgtagtcatgatcaacatcaaaactctttgagggccagggcgcggtggctcatgcctgtaatcccagcactttgggaggcggaggcgggataacttgaggccaggagttcgagaccagcctggccaacatggcaaaacccatctctactaaaaatacaaaaattagctgggtatggtggcaggcacctgtaatcccagacttgggaggctgaggcacaagaatcacttgaacccaggaggtacaggttgcagtgagcccagatggtgccactgcactctagcctgggtagcagagggagactctgtctcaaataaaaaacaaacaaacactgtgagggccagggaagctttgtgtctatttttgtctctgtctaagatggatgatcactgagctataaatgagtgaatgaactgcagaaatagagcttctcttcagtctcatcaagactttagtcctgtgtccctcagttttctccgaatccctcaatccccacactgtcacccccacctctgcatcttttcctagccagccttgaacccttgacttactatttaaacacagttttgtcagtacctgtgatgcccttggccttttgtctatctattgtgtcacctgcctgggtaaaacccagacagtgatcaatgtgactccttcttctccgtgcacctaccccacccggggggtctcaagcctcagctgggcccgcagggccattggataagggaaaatgccccagtctgccccctttccaccactctccaggggcacgttagatgctccaggtgtgcccatgaacttcctcgcatgggagagggtccaccgtccagcctctgtggatagctccactcgaaagcttcttgtgggccaaaaatctagctcagcaacatctagtgcaagccacatatgtaattttaaattttctagtagccacatttaaaaagtaagaagaaacaggtgaaattcattttgatgttatattttatttcagcccactatatccaaaaaactatcagttcaacttgtaaataataatataagaattattgaaatctgatgtgtattttatgtttacagaacatgtcaatttggaatggccatatttcaggtgtccgggagccaccttaagcagtggctaccctactggacagggtagctcgccatcattctggctttttttttttttttttttttgagacagagtctcactctgtcaccgaggctggagtgcagtggcgtgatctcagctcactgcaacctctgcctcccaggttcaagcaattctgcctcggcctccctagtagctgggactacaggcatgtgccaccgcgcccagctaatttttgtatttttagtagagacagggtttcaccatgttggccaagctggtctcgaactcctgacctcaggtgatccgcccatcttggcctccccaagtgctgagattacaggtgtgagccaccgcacctggcccattgtggctgacttctgaacccggtatggggtccaaagaacctccccatccttaccgtgccacccaggagatccggctttgcctgtgtgctttctgccttctcctctcctagttaaggaactcggtcattttaatcaagtactctgattctttcgttctccaagccctttcccaagttgtatctttccagtccattttatctcaacttctggctgaagaggaaaccactcgtgttggtttcccacgttgttttccccttgctcctagattttccaccaagaaatgtagatggtttttgtagataagtcctcacaggtgggaaaagagaattcaattcctgtctcatgtattcagatcattttgccagcgatgtctgtgtggccccaggcatggtgtgccagggctctgagcccatttctctgtgattctcccgacgctgccctcttctttgaccttcatcctccagcaggtggctaaatgactgcccctgctcctggcgtctcacccacacttgacaacatccagaaggaagaggctgtggtttcctggggtctcttgtaagggtcaggaaatctttcccaagactcttctctcatatctcattggccaaaactgggtcacatgtccactgtaaaccaatcccaagccagaagaattagatgatcgtagtgaatcaggccaatcaagaatcgtaccctggagccggcctcctctgagcataccgcctggtggaagatggtggtccctgaacaatagttggcggcttttatccaggaagaaggggtgtgtggctgttggatgggcccccgaaggctggctacagtctcacatcacccacttctctacctgcccccatcctgcccctgtccttcctgttgcagtggaaggggtagtttgctcccatctgaggttcaccacctcttacaccctgggtttcatggttggccaccttctcaggggcctcagtcattggtctggctgtgtgtgcagcctctcctctctgctagtactttgtctgagcataaaaataagtaccagccaggcgcggtggtttatgcctgtaatcccagcactttgggaggccaaggcaggtggatcacctgaggtcaggagttcgagaccagcctggccaacatggagaaaccctgtctctactaaaaatacaaaaattagccgggcgtggtggtgcatgcctgtaatcccagctactcgggaggctgaggcaggagaatcgcttgaacctgggaggtggagtttgcagtgagccgagatcgcgccattgcactccagcctgggcaacaagagcgaaactctgtctcaaataaataaacaaataagtaccgacctcatgcaccttaagaacaaccaccaactaccctcgaccctatatcctttctagttcttcttcccttgcagccaaaccttttgaaagagaagaaacatgccctctcttcacctgcccttgtctctcccgtccactctgcagtccccctcatcagctccacagtcaggctgcctaactggttctccccttgccgatccattctccagtttgctgctggcatgagctaaatctcagtgctcccttctataaaatgggctgcattcctgtctcattgagttgctgtgaggattaagtgaaaccatgtggtcaaagtgcttagcttggcccctgatacatgataagcactcgaaatgctatttaattcttccaaaagctatttctctatttagctttcctaaatactgtttaattcaagtctttcatcctgcttaaaacgcttcaacgtcttctgaggttctttagggccacgtcctatgagaccatttcagcagcagcagcctgcatccccattcagtggcatggtgaagccattggcagttccagaagcattctcggggccccgggcttcgtatacattttgctcagagagcatgccctcaaccgtcccctgtcctctggctatgccatttgtccaccaggtagagcctcctctgaaagcaagagccttccctctctccttccctcctcagtgccctcccctcaggcttcctccccaccagcctttgccctggcatttattccaggggcacaattgccagttcacttgctgggctcccaaccaaagagcagggaccttggggaccaaggggatgtcttcttcggtttttattttcagtagccagcagctgctggggcctctgtaaccgtgtgtgggatagatgaaagcagtatttgcctaattgacaggcgaagtctagcaaaggagacaggctcctgcaagagcacccagaacacagtgtgctgcacactgaggtgtggtcgcaggccacatgctcccggggcaccaaaagccagggggtgctgggcaaagggagagatggggaccgtgaggtgtcccctgaagcgtgggtaggatttcccccaggtgaaagtgcagcagaagggccttccttaccgtggaaacaataggaacagaggcacaaatctgtggtgtttgggggagctgtggcagagccgctgtggccagagcccagggaagagtggagctgttagagaggatgctctcagggtggccacgcacaaggcgctggggtttattccacagagaaggagtgagcagccagtagacactgagcagcagaatagcgaggtcatagttaccattcctgcaaggcagcctccaaattggttgatttggggagaatttttttttttttgagacagggtcttactctggagaccagtgaagatctctttaccccctttgtgggagagcagggttggagtacaatggtacgatcgtagctcactgcagcctcaacctcctaggctcaagtgatcctccttcctcagcttcccaagtagttgagactacaagcaggcaccaccttgcccgggctaatctttttttttttttttttttttttgagagatggcaggggacagaggagggggtatcactttgttgccctggcttgaactcctgacttcaggtgatccttcccaccttggtctctcagtgttgggattacaggcatgagccactgtacctggccagaggagagtttttaaaaggggctgtttgctagggtgtaggcaggtgtgaaagaaatcacaagaaatagccaggtacagtggtggctcatgcctgtaatcccagcactctggaaggccgaggtgggtggattgcttgagcccaggagtttgagaccagcctgggcaacatggcgagaccctgtctctacaaaaaaatataaaaaattagctgggcatggtggcgtgcatctgtagtcccagctacctgggaggctgaggtgagaggatcacttgatcctgggaagcaggggttgcagtgagctgagatagtgccactgcactccagcctgggcgacagaatgagaccttgtctcaaaaaaaaaaaaaaattacaagaaagagctccatgcgccacacggcagtgacgagcagctgggtgctggcacctccctggggttaagggatgagggatcgcacaattctcagaaccccgaggccctcagggctacctcccaggaactgtgatccccactagagggctgtgccagccgcaggcccagccaccatgcaggcaaggtggggacaaacatctggcccaccttgcccagaagccagaagaccagggaatctactagggcaacacgccctggtcagccccgcagggtggatcttgagggcaaggccaagacacccacagtgtttaggaagctgggactcgctgcagcaaccagcaggtagcagtgtgtgtcccggtcagcccgctgctcacaggtgccaggcttccacaccacccaggctagtgaggcctcccaaacatgcttagcgctgggagtataaggtttcctacggaatcttctctgtaaaccagggttctagtggtatttgctggaagtcacttcagcatcattcatgcgagtaacctagagggcacagggctacgcttcgggacatctgatatgggtgaaaggggagcgtataggagaggacttaatgccaacaaaaatgatttaggccgttcctggaattcaaaatattcattcgaagaagggggccagccaagggggccacactcaatgaaagagtgtactctcattcattggtgcacttggcaaacactgaatccctgtgtgtcctagactctgcagtagatgcttaaagatgtgcagagactccagattactaccaccaagccacagtcctatggattaaagtgctgagggctgggaaacccaaccctgctctcccataagtgggtagagaccttcgttgccaggggcaggacagggccagggcctgtgggcccagatgatggccatccccttcccacccagctccctcagtgcgtggctttaggtctacctgtgcagtagttcacctggtgggatttcaggggcttctccagaactcacacctctttgcgttgtccagaagttcttttttttttttttttttttttttttttgagacagagtcttgctctgtcacccaggctggagtgcagtggaacgatctctgctcactgcaacctccacctcctaggctcaagcaactctcctgcctcaatctctcgagtagctggaattacaggcgtataccatcatgcccagctaatttttgtgtttttagtagagacagggtttcgtcatgttggccaggctggtctcaaactcccgacctcaggtgatccgcccgcctcagcctcccaaagtgctgggattacaggggtgagccaccacacccagcctgtccagaagttcttgtgacaaagaggggctacctttcattccacagctggaaataaaagatttaacatgcaaatggatggcaaaagtctcatttacataattttctttctttcttttttttttttttgagacggagtctcactctgttgcccaggctggagtgcagtggcgtgctcttggctcactgcaacctccgcctcccaggtttaactgattctcctgcctcagcctcttgagtagctgggactacaggcgcgtgccaccacgcccagctaatttttatatttttttttagtagagacagggtttcaccatattggccaggctcaaactcctgacctcgtgatccgcccgccttggcctcccaaagtgctaagattacaggtgtgagccaccgcgcccgggctgctgctggtttttatcatggatgccttagcttagcattctttggcccttagacccacacctgttcttcttgcaggtgaccatctacctggggaacagagactacatagaccatgtcagccaagtccagcctgtgggtaagttgcttggagaaaactgtaatgctggttttcctttaagtcacagataaccgctcactttgtgtttttaaaaactggccttgctaataatctaaataaagacatgcaaattaaaacatcagtgaggcgccactggctgattggaaacaattttatttatttttatttttatttttatttttatttttttgagatggagtttcattcttgttggccgggctggagtgcagtggcatgatcttggctcactgcaacctctgcctcctgggttcaagtgattcttctgcctcagcctcccaaatagctgggattacaggaatgcatcaccacgcccagctaattttgtatttttagtagagatggggtttcaccatgttggccaggctggtctcaaactcctgacctcaggtgatccgcccgcctcggcctcccaaagtgctgggattacaggcatgagccactgtgtccggctggaaagaattttaaagagtgtgaagagacaaaggactcatgtctggaatgtatgaagaacgctcagaactcagcagtacaaaaagcaagatcctatgagaaaatgggggaaagacaggaagatacatttcatcaaagaagatacatgaagacaagcaagcacatgaaaacatctttggtatcattagccactagggaaatacagattaaagctacagtgagagcatattatacacctaccaaaatggctaaaatattttaggttggtgcaaaagtaattgcagttttttgccattactttcaatgtagtggcgagatcttggctcactgcaacctccacctcctgggcccaagcgatcctccgacctcagcctcccaagtagctgagactacaggcatgtgccaccacgcctggctaatttttgtattttttgcagagatggagttttgccatgttacccaggctggtcttgaactcctgagctcaagtgatctgcctgccttagcctcccaaagtgctgagattacaggcgtgagccactgcacccagcagcagcttcttaaaacatgaaacacatacttaccatatgacccaacagttgcatcccgggcacttatctcagagaaatgaaaacttgtgtcctcacaaaaacctatacatgattgttcacagcagctttatttgtggtagctccaaaccggaaagaaccaaaatgtttctcagaatgtcccacgtcagcttcctagttttgatattgtactgtaattatggcagatggaaccattgggagaaactggatgaaggatactagggacgtctctgtactatctttgcaacttcctgtgaatctataatcatttcaacacaaaacgtcttttaaagagtgtagaaaaactggcagtttcagacactggatatgcaaatgtgccttggcaaaacactttctggaaggttatttggcagcatgttatcaaaagccaaatccaattctataatttatttttaaaaagtcatggagagatataaagacatatgtataaggatgttcatcacaatattaattacaatgggaaaaattggaaacaacctagatgccctaacaataggaagtgattaaataatttatggtacatccattcaatggagtaatacatagctattaaaatgattagcacgttttctctatatgtgtgtgtgtgtatatatatacgtgtgtgtatagatgtatgtatgtgagtatgaatagatgtttgcaatgtataattgagtgaggaaagcagttagctgaacagtatgtacaataggatctttttctttacttagtaaaagcattcgtataattaagttatatatgtctggaaaaaaattttttttgtcgggggtgtgggacagtgtctctatcacccaggctggagtgcagtggcacagtcacagctcactgcagcctcaacctcccaggtttaagaattccccctacctcagcctctcacatagctgggaccacaggcatgcaccaccgcacctggcccatgccctgctaactttttttcttttttcttttttgtatgttttgagaaaaggtctggctctattacccaggctggagtgcagtggcatgatcatggctcactgcagccttgacttcccgggctcaagggatcctcctgcctcagcctcctgagtagttgggactacaggcatgtaccaccacacccagctaattttttttttttgtttttttatagagacaggctctcattttgttacccaggctgctggctaattttttttaaaaactttttgtagagacaaggatctcactatgttgctcaggctgctctcgaactcctaggctcgagcagtcctcctgccttggcctcccaaagtactgggattacaggcatgggccaccacacctgacctggaaaaataaaataaaaatctgcaccaagatcttcacaataggtattttcaggcagtaggaatttggatgacttttttccctttgcctgacttttctttctttcttataatgaacatggattacatgtgtaattaaaaacatgcgcagtttttaaagtaggtgtctggtttctttcatcttctccaccctcactgctctctccctcttttgccttagatggtgtcgtgttggttgatcctgatcttgtgaagggaaagaaaggtgagatgaagccccttgtctcaggctggtttctgggcggagtggactgctctctgggcggctctgggaaggggcatttacatggaaggagagacaggaaggcagaggcagcgctcttgcacatggaaccagtgccaggcccactgacccacactcctgtacctaattcacgtgacataggtcctgttgacaccagagctcactcgctcagcaaagtcattgtccagggtggcagataagtagatggtagacggagcccaggtctgtggcccccattcctgtttgctcgcccctgtttcatgtacttctgtgctaggggcaaactcaggagggtgcctggggtgcctaggactcaggaggacacaagaccttgaatgaatgaggggcgagtgagtgggcagtgtttcttctgagtcagtggcgaggggcagttaccgttggggctgacaggcaaaattctcaaccaacaccaaaaagggggaaatgatgcctgctgggggcagggggagtaagacccagaatttattatggtgcttacttcgatggttctgaaccagtgtcacggcgcccttgaagatttctggcagttttgatgtgtgtggtaagtaatttgttactaataacagttgcataaaccaaattagaacagattccagctatccttgtgataatgtcactgactcagttccattctaaatatgcctttttgagtgttgctactggcaacatcaaggaattgttcagaaccctggatgtgccactggaatacgtcagctatggggccatcagcattgagggggcatggctgaaatggggccccaaacggccccctctgtcctctccaccttcctcctgggtgccctgctcctctctggaccaggaggcatctggtttgagccccgaaagcccaagtccttgaccagagaagggcgcctgttctcagggaaagccactgcacaggacagctgtcaaaccacgtggtctctgggcaccttcttagtcctgagcttgaatgaggggcgagtgagtggccactgtttcttctgagtcagcagcgaagggcagttacctttggggcttgcaggcaaaattctcaaccaacagctaccacgcacttggcggggccgcctctcgtgctttatatttgagaaatatgtgcttcgtgtcttttttagaaggtgtagtgaacttcatacaattcttctggtctactgggcgcacacttcaggtctgttcaacaagtagaattttcagaagtgggggtttagagaatgctcagtatgtttcagagcagcgtgaaaaggaggctggaacttgagccttctcaagttggatttcacctccccatgtggcctgtgagccttcaggctcctcactcagcccacgattgaccctggcccacatctgctttgctgcccagcgctgtttccctctgcatcttaccttcttccttcattcgtccagacatcctgccctctagaacctgagcagccagcactgtctcaaagcctctgaggccacagagctagggaatgaagggggcgggcaggatggaggggactgggtcctctgtcttcagatttctaccattctggcaacatgatacaattgggaggaagatgccaggatctccctttagagcggtgaaccctcatgaaggggctgattctccagagtggtgtggagtagctgggtggcagggttctctccaatcccagcccctatcccctccagatgctaaaggttgaaaacccgtgttcgctgcccattccgtcagtggtggtgggtgccaggccgagggccaagtccgaccctgccttcatctcccttgcagtgtatgtcactctgacctgcgccttccgctatggccaagaggacattgacgtgatcggcttgaccttccgcagggacctgtacttctcccgggtccaggtgtatcctcctgtgggggccgcgagcacccccacaaaactgcaagagagcctgcttaaaaagctggggagcaacacgtacccctttctcctgacggtgggtgactcctccggccagccctgcttccttcacccgcagcaccttatcatgtggatgggggcaaaggaaaggggatagaggaagaacttcacatctgcaggcctggaaattgcacccttgaaagaaattctagattgcatggtctgtgattgtctttttttaagtccttgaaaatagcctcttagcctttgaagacaccctttcaacctaccgtttacatatttcccttgacccgaccccctaattacatgagcacgtgttattcctttgcttgctaagctcgaaaaagaaagctcacagaaatgcccctcggccctggggagttctaagtaggaaagggttccctacaggacaggagagcttagcgaagtaagatgtcatctttttccttgcccacagcttgggggatcacaggagatattttcatctctctgggggcccgtctgtcatccattgagacctggctaccaacggtgccagcgtgcaaactctctgaagtcttgggcgtgagctcaattgggggaagctaccatctgctttacgagcatgtttatttgtcttaagagaatatacacttccaaagttacatggttcagccttaaaaaggaatgaaattctgttctgtgctacaccatggatgaatcctgaatacattatactaaatgaaaggacccagacacaaaaagacaaatactctatggtttcacttacaggagatacctggagtaatcagattcatacagacagagacagaatagagcttcccacaggctggggggttggaggatggggagttggggtttaatgggaacagagcttcagattgggaagatgaaaaatgttctggtgatagatagtggtgattactgcagaatggtgtgaatgtacttcatgccaatgaaccgtacagttaaaagagcttaaatggtaaatttgatgttattctatgtttatcacaactgttttacaaaatcacatttacaaaaaagttataaggtcctgggtgctcccatgtacctgtgctgggagtttgaagtgacataaccttttagagacaatatgtcaacacgtattgaaagccttaaaacgtgtgcttctccgaggtcaggagattgagaccatcttggctaacatggtgaaaccccgtctctactaaaaatacacacacacacacacacacacacacacacacacacattagtcaggcgtggtggcgggtgcctatagttccagctacttgagaggctgaggcaggagaatggtgtgaacccggaaggcagagcttgcagtgagctagatcgcgccactgcactccagcctgggtgacagagcgagactctgtctcaaaaaaaaaaaaaaaaaaaaaaaagtgcttctctttctagcagttcagcttatggaattaattgtctaaaactgatttattacagcattgtttgtaatggcaaaaaagtaaagaccacttcagtagccagcaaaggggactggctacgttaagtgtacattatagagccctaaaaaggatgattcagaactgtattttatgatgtgggaaaatggtcacaatgctttctgaaaagggctagaattaatgaagtgagtaaacagactacagaacgtgatcatcactttgtcccatttctgtaaaacgtcttctcacatatacatatttgggcgtggccagttgcagtggctcacacctataatcccagcactttgagaggccaaggtgggtggattacttaagatcagaagtttgacaccagcctgggcaacatggtgaaaccccatctctagcaaaaatacaaaaattagctgggcatggtggtgtgtgcctgtaatcccagctactccactgcactccagcctgggcgacagagcaagactccatctcaaaacaaaacatacatatttatgtgtacaggcaggaaattttgggaaggttatgttagcaatatgtatttgggtgtcaggagtataggtgaatgtgatttttcttttttcttgcttatcatctttattttctaatttttacatgattatatattacttaatggaacagccccttctgaaataaatgattttttatttgtttctttccacagtttcctgactacttgccctgttcagtgatgttgcagccagctccacaagattcagggaaggttagttcaagaagaaatgccatggttttatggatttgttcattccttcaatagacttttttattgtttttgaaacagggttttactctgtcaccaatgctggggtgcagtggcgtgatcttggctcactgcaacctgtggtttctgggctcaagtgattctctagcctcagcatcctgagtagctgggactacaggtgtgtgccaccatgcccagctaatttttgtattttgtgtggaggcggggtttcaccacactgaccaggctggtctcaaactcctgaccacaggtgatctgcctgccttggcctcccaaagtgctgggattacaggtgtgagccactgcactggctccttcaatagacttttttttttttagatggagtttcactcttgttgcccaggctggagtgcaatggcatgatctcggctcaccacaacctctgcctgacaggttcaagcgattcttctgcctcagcctcccgagtagctgggattacaggcgtgggtcaccatgcctggctaattttgtaattttaatagagatgggttttctccacattggtcaggctggtctcgaactcccgacctcaggtgatctgcctgctttggcctcccaaagtcctgggattacaggcgtgagccaccgcgctcggcccattagacttttaaagatagctttttttcatggaaaatttcaaacgtacccaaaagtagagagaccagtataaagatcctctatgaacccatcactcatcttcagcagttattaaccatgaacatccttgtgaacaaaatcacagagtcccaacccccatgagtctcacacattaaccgagagcaccaggtaaacccaaataacaaggaactacacggcatgccaggtggccacagatgctgtggagaacaagaggcttgtgagagacaaggggagtatctggtgggatgtgtgttgaggatgtttaaagccagtctctaatgaggcaaaggagaaagccacactctcccaggggagagccttccaggtagagggcgcacctcgcctggtgtgttccgggggcagtgaggaggttgcctgctgagtgagaggagcaagggatgaaagggggaggccaagtgcagtggctcaggcctgtcatcccagcactttgggaggctgaggtgggcggatcaacccaggagttcaagactagcccgggcaacgtggcgagaccccatctctacaaaaaatacaaatattagccaggattggtggcacatgcctgtagtcccagctacttgggaggctgaggtaggaggatcacttaagccctggaagcagaggctgcagtgagctgtgatcatgccactgcactgcgctctagcctgagcgatagagtgagaccctgtctcaaaaacaaacaacaaacaaaaaaagtgggaagctgaggttagagtggaaggggaggtgtggccagatcatgaagggccttgtcgatgttgtagagacttgagtttttgcctgaatgagatgggagccattggcaggctgtgaatgacaggcgctgactttccaaatggtcactatggccacagagttgagaacagagttgagatggccaagcatgtgctgtggggactgagggtgtgtgagagaggagtgagtcaggtggacggggctccagcatggaaggaggcggtggggacaggaggagaaggaggtgccaggacccgtgggttcaggccctctaagccactgggtctgggattcatgaggaagggagctacacagagaggcagtttctgtaactggattatgggatgggcagtgataggtgatgacaagggcagtgtttttgtcgcagggcatctgcgacatctgacccgttagtggttcgtgaaatcaatgtagtggatccaaaatggaagggaacagaatggaatggaatagaatagaacagacagggtgcggtggctcatgcctgtaatcccagcactttgggaggccgaggcgggcagatcacctgtggtcacgagtttgagaccagcctggccaacatggcaaaaccccgtctctactaaaaatagaaaaattagccaggcatggtggcgcgtgcctgtaatcccagccaattgcttgaacctgggaggcggagattgcagtgagccgagattgtgccactgcattccagcctgggcattagagcaaggctccatctcaaaaaaaaaaaaaaaaaattagctgggcatggtagtgtgctacttgggaggctgaggtaggagaatcactcaaacttgggaggcggaggttgcagtgaactgaaattgtgccactacactccagcctgagcaacagagcaagactccatctaaaaaaaaaaaaaaatagaacagaacaaaatggaatggattggaaaatctcagagtatgtcacacatggtgaagctgaatatggtgtcaggagagttgttgcacgtttgtgtctgtttactgggctgtgttacaaatccaactttcagaacatctcgaagctagtggtccaggacaatggggtggggtgtgcgcagccaagatgggggaagatgaggtgattacagaagaagggggcacagaacaatggggaatggaattggttgtgttagatcttatagtgctctataagagagaccccaaattcagatttttaggtgacctttcttgatttttacaacactgtataggcccaacaaagcaccacctattttctgttctaggagaggagcaggtcttagcacagctgcagggcttcaggaaagtgggtgcgccctgagcccagggagcttgagagaagtgcctgaatgcctgggggcctgggggcttgacagctgagaagcccaggtgggcgagcagaacaggcgttggtgtggctcaacaacggccggctgatggcagggaaggatgcatatttattttccacttagagtttaggactgctatgattccctggttgcagaaccgataaatccgtgcctcatatgtcaccatggacagagctggcttcctgtaatttttgccagctctactttcccctccaggcagtggtggagggcaggccggtgccctcctctggctccccaacgcatgtgaacatgcagagatgagggaggttacaaagggcttgcactgggggccaggggcttcacacactgggaatcggggaaaggtcactggcagatgcgttcattcagcccacacaatgcttaaaagtctttttatttaatttaaaaactaggagatttcactccaaattccacgtgaagtttcttttttaaaaatcaagctggctgggcgcgatggctcacacctataatcccagcactttgggaggccaaggcaggcggatcatgaggtcaagagtttaagaccagcctggccaacctagtgaaaccccaactctactaaaaatacaaaaatcagccgggcatggtggtgcacacctgtaatcccagctactcaggaggctgaggcaagagaattgcttgaactcgggaggcggaggttgtggtgagccgagatcatgccacttgcactccagcctgggcaacagagcaagactccatctccaaaaaaaaaaaaaaaaaatcgtgctgcccgcactgggtgccttgctgcctggccacatgaggctgccgctgaacagcaggtgaccatgggggtcagggtttccataccctatcagggcattcctggaccccagcgctggccctgtgagtgcctgtacctctggcccctgctgtaggcagtggaagtcagtaagatgcatgggatcacagttggggacacctaagtgtgcaaggtggcaggaggcaaggatagccaggatgtgaatgactctccacggcagcaggagggctcatggggcaggtggatcccctccctctgggggctttgggcccatggcacactccttgcgctactgtaattgtttcactgtcagtatgcttccaaatccctaaatggtgcaaccccgaataggacatggccaagacaaaaagagatagtgccacatcatgtgccctgtgtgaggtgtggccctctggcccggcacccagggagggagtcgctgatcgctgcctgtctgctctctctccccaacagtcctgtggggttgactttgaggtcaaagcattcgccacagacagcaccgatgccgaagaggacaaaatccccaagaagtaagagtatggttgcggaataggtgaggggtctgcggtgggggtggagagaagagacgacctccaccttgtctctgtgggacagacctcttcccatagggctggcacggctggggtaccatctgcatgtgggatggaggtcaaaggttgatcatttttggggaaaaaaaagaaaacaagaaaatgacagggaagttagcaacctccagggctcacgtaagccccgaaaagctcccgggtttcccctttgttgaagttttgttgttgttgtttgtttgtttgtttgtttgttttttgtggtaaaatgtacacaacatgaagtttgccattttaaccacttttttttctttttttcttttattttttgaaatggagcctcgctctgtcccccaggctggagtgcaatgtgacctcggctcactgcaacctccgcctcccaggttcaagcgattctcctgcctcaatctcccgagtagctgggattacaggcgtgcgccaccacgcctggctaatttttttttttttgtatttttagtagagatgggtttcaccatgttggccaggctggtcttgaactcctgacctcaagtgatccgcccgccttggcctcccaaagtgctgggattacaggcgtgagccactgtgcccggcccattttaaccacttttaaatgtaccattcagtggcttaagtacattccgaatgttgtgtagccttcaccgctgtctatacccaaaactttcccattgcctgagcaggaactctacaaccattgagcctaccgctccatccttcccattctcccaccccctgtgctgttttttttttacctaaacaagatttccgcctggcccttcgcactgtctccttgtgccccatgtacacatctctggaggcgcaggatagtgagctgcagtaatggagctcgcatgtatatggcagctattccatgaggcccttgacgccctcacaccttagccttgctgacaggaggcagagctgggaatccacggagcctaaggggctaagcttggccctcgggatgttgcctggccccacagcttcccccacagggaagggaccaggacccagacccccaggctcttccaccgtcagggctgcctcaggctctgaccagtgtcgttgccctcttcccgtccaccctgtctccatggggagcattcctggagaatctccatgtgacagtggggagagaacagaagcctccctaaagcggcctgggtgccaatccctggcttgtctgtggctgtttcccacaggagctccgtgcgattactgatccgcaaagtacagcatgccccacttgagatgggtccccagccccgagctgaggcggcctggcagttcttcatgtctgacaagcccctgcaccttgcggtctctctcaacaaagaggtaaccacctaccatcgctactacccgcagggcagcaggcctaggggcaggccccacacccctctcttcaccagccccagcccttaactacatgggtgccttgcaaggaagcttgtttctaggataaggcaccaacatgcgtaagtgactggcctgttttcacagcctggagctggtcagcatggtccttagaggaggacggaactggcttgcgttccacccactggctgtcccgagggactggggaaggaaggggcgctgcttttcacatacctgccccccagctgtccttgtcctgtccacctccatgggccttgttcactcatggagcatcaatagctgtggtatcccaaattcttcacttcctgggaaatttaagttttgcagaaaccatgtgggatggcagtgtcacctgtgatgtcatctcttaggggtgtcatggtgggaaaaggtgagagctgctggccaaggctggctctggttcctctggtcagcagtcagccatttgtgcactgtgtgtatacacgtgtgtgggtgtgcccaggggctgtgttacacgggctctgctgggtgggatgccagcacttggctttcccagtggtttcctttcacttcactcatcctgcccccataacctcctgacccctggcctcctccgatgtgatgatcggaactctgttcccctccccagcttcccacagatgggtggaatgtgtttcaggcccttccttagaagaaatgtattgctatcacttcatcttccttaaattctgccgcttttattccagtgaaagggattgagatgaatctagaaagcagtaagattaaagacaccgccacatctgttctcttcttctgacctatctgctgacttttctagatctatttccatggggagcccatccctgtgaccgtgactgtcaccaataacacagagaagaccgtgaagaagattaaagcattcggtaggaccttcttctcagaagtagagggcatagtcttctagaatttctgatcctgtttcctgagaggtcacttctctggtctgataaggcccttctgggtccttggaactggctacttgtctctgctgtcataggcagcaggactgcggagggagaaaggccttacaagttatctcattcaacttcctgcccacttacggctggtttttgtcttggaacaaaattcctggcaagtgatctctttccatggttatgccttcctggagggccccacagtgctcattgtggttgacagatgcagcacattgttgtgggtgaggcctaatttgtggactcatgctgtgggctctgtgatcccagctggcatccacagcaggggctccttgtctaccttcccaggctttgtgtggcttgaaggaggtcccacatggaagcgctttgtaaatggtgaagtgtgactgtctcggctcaaatggccatcatgtcatggctgaccttcccatatcctacaggggaggtgccttctgcctgttgttcccacacattaactaagctcaaaaggcatcaaagcacagggggtcttatataatggtcttatttggctctttcatgaggaagacatgatggaatgacctgtgagggtaacctctaagttcactttttaactcaaacattcgatgaccaagacaaagttagacttatgcatcttggggtgactgtcccagggcccaggactgaggatgtggaacttccagtcctaaaatgggctctcccgggcaagccagggtgagcagtggccctaggtgtcatataccacttttccctgtgagtcatcacagatgagggtcagaaatcctgatgcgtgcagactaaggaattctagacttttccctccctcccttccttccttccttccttccttccttccttccttccttccttccttccttccttccttccttcctccctttctttcacagtctccctctgtcacccaggctggagtgcagtggtgtgatctcggctcactgcaacctccagctcctgggttcaagccattctcctgcctcagcctcccaagtagctgggattacaggcgtgcaccaattttgcctggctaattttgtattttcagtagagatggggatttcgccatgttggccaggctggtttcaaacccctgacctcaggtgatccatccgcctcagcctcccaaagtgctgggattaccggtgtgagccactgcacccggatagctgttaactttttaaaaacaaaatattaattgctttctataggctgggcactgtactgcatgccttgcacaaattgtttctttatcctcaaactttggctgagtgcagtggttcacgcctgtaatcccagtactttgggaggccaaggtgggaggatcccttgagcccaggagttcaagaccagcctgggcaatatagggagaccctgcctttattttttaaaaaaatcctcaagcttaattttaaaggtgattaaaagtcatctttttaatcatcacaacgtccctatgagttagatgcaattattacccccattttactgatggggaaactgaggcttagaatagataaataattcaccccacagttagtggctaagccaagattggcacccaaacagcctggctccaggcccaccttcctatccaccacgttccacccaccaaccagtcctgtactgcctctagctagtctcttggaggacaggaaggacaatgttcatgaagtaagatggaggatgttagaaagggctgagcaggggaaaggaggggtctcccaggagctgcagccttaggggacatgggtgggagttgatacagagcaggttatgggtgaccagaaatggcctggagacaggacttcaaaaccccagccttgaagctgagggctgagaaagcctagccttggaagtggagggaaaccatcatcagagaggagagaccagcgtgtaccctgggaggccgcagggaaagtgcacgtgttgggggaccagtgctgaccaccggactcccgtcttccccttgcagtggaacaggtggccaatgtggttctctactcgagtgattattacgtcaagcccgtggctatggaggaagcgcagtgagtagctgttggggtttccgtttcctgggcgtctcagccttctgtgtcaagtttctcgccgtttattgctgaagaaggaactagaatgttcagctagctcgccagccttccacttccttcctctttctcccttcgagggctgcacagaaagttagcatcttagctctgcatctaccacacccctctgtgcccatcttacaggagttctgaggattaatgcaagccaaagaatgacgcagaggagagaaataaagacagaaatgtcaccatgggatcagctggctttttctatttatccttggaatgaattgttaggaatttgatactatttccacctcccagaagatggtcaaatgaactgtcagcccaggctaggattccctatcttttgatctcaaattgaaatcttataccagtgacaactggattagaatatatctgttcttagcctgttgttgtgaatgacttttcccctttgttagaatcaaaaacaaatgagaatcctgccatggttcctttatgctggcctgagagacctgcccagctttgctgtgtgccacaaagtcaaatagattcatttaatacatggcttggagtggggggcgatgatctcccacctccagccccccgagaggatagctcgaccaggtcttaactctttgccttgctggcatgttctaagcaccgttgtatgtaaaaaatattatcagggttagaggaaggttagggtaggggaatgatgaaagacaactgattccttaagataatataaggtaatagatagatttttttgagatggagtctcactctgttgcccaggctggagtgcagtggtgagatctcagctcactgcaacctccaccacccaggttcgagccattctcctgactcagtctcccaagtagctggaattacaggagcccgccaccaagcccagctaattttgtatttttttttttttttgagacggagttttgctcttgttgcccaagcaggagtgcaatggcgcgatcttgactcactgcaacctttgcctcctgggttcaagtgattctcctgcctcagcctcctgagtagctgggattacaggcacacgccaccacccctggctaattttttgtatttttattagaaatggggtttcaccatgttagccaggctggtctcgaactcctgacctcaggtgatctgcccacctcggcctcccaaagtgctgggattacaggagtgagccaccgtgcctggctgattttgtatttttagtagagacagggtttcacctgttggccaggctggtctcaaactcctgacctcaggtgatctgcttgcctcagcctcccaaagtgctgaaattacaggcgtgagccaccgcacctggcctatatgggaatatttaaaaggcaactttaggagaaactattactgttattcaaaacagattcaaactgtaggtctacaagggagggagacaggaaagaaccaccactcactgcctcctttctgccaagattgggctctgttctgcctttaggggatcctcgcacatccctgtgccctggaggggtcttggccctggttcacctttcctcatgtgctcagcaacatgggagcaaaggatcctggctgagttttcccctaatatgtattccatcacctggtcctctttcaaagtgttgggtgcattttgggtcaaagattcccaggaaactggaaagcattccaaagtcccccaaaggctggaggagcctgggagctggactggaccatgctgacaagtctgaagctagaggccactcagaaagctgcagagcaggagccatcgtcccagagccctgtggcttctggggctttagtgggcaggcttccacggaaccaggacagacctgactcccaagctgctccccaccatccaaacccacatcctgaagctctggggagtggccccagagccttggcatagtcctttggcaagctctgcacaaacacaaaaagtccatcctctgagcccaaccccaagggccctcttcctattccagccatctttacaatgctgtttctgcttttttcaatgctcaaattacgctcattaagagaggttccaccaggacccagatggtaggatgtgggccaccttgggctctggcagatttctgtaaagagcttcctgtagacactggaggcaggataggggacagctgcttttacctatccagggaaacttgattagggaaaggaagtcctttcccagagaggcagttcagacttccagctgtctcaggacagccttagaatggtcctgatgctggccacaccccaccttgttctggctaggcacaggatggagggtgtgcttccggcacgaatgggctctgctgtcagagagtgtgcagccacgtgactgtgggcacacttcccgtctggaaaatggggatcttggagcacctgcttggtatggggttgatgagggtaaggtgagagttttgaggacaggccttagcacttggcctggcacacagcatgcacgtgagtggaggagccaactctccagccgcagaggctgcttcatgatcctggccatgctgccgtgtgtctgcctggagaaacacacattgctgtgtccccagctggatcccagacccgcctgttggcacagggtctccgccatctgtcagatgttgagaaatctataccccgactgatgatgaagaagatccagtagagaaagagcatgtgctgctttggacccaagctattcggtctgtgtgatccacaaattgtgggtccctgcgttgcccctctagacaacttaccacacagtcacactgtgacccccttatagtgacagtttttggtgacaagaggctttctggcctggactcgttgctgacaccaaccagaaggttctgcaggccaccgtgtggttcacaaagtctcaggaggaggctgtggtctctgactcttgagccagtttgtctcattaactccatagaacattctagaaattcagcaattcagaataggctgagttgcttgaagaaatatcctcctgttgctgccagcccaccctgagatttcacaagcactgttctgcttctcgtaagtcaagttcccaggctcttgaacccaccttcccaggaggtccatcaggggatgtggatcctggaaaatgcctaatgtcaaataggggctcatggggtccatggcagctttgatggttataaatctcctctgttcttcttcctctagagaaaaagtgccaccaaacagcactttgaccaagacgctgacgctgctgcccttgctggctaacaatcgagaaaggagaggcattgccctggatgggaaaatcaagcacgaggacacaaaccttgcctccagcaccatgtgagtcctcgaggctcagggaataagccctggcagggcgggctggtgctggtctgcttcccttcacatcaccctgctgggctcgcaggcacgcacgtgcagcatggtggtctggcgtgtgtagtgtggagtgcatatctacgggcccacacaaggatcccactctcacccctggtgtgatgtgggggttacacccatgggccttggagacagctgtgcgctaaccccagctctgctgctgaccctgggaaaacaccttgagttctctgagaacctcagttttcctgtttgtaaagtgggggcggtaatagttcaagtctcatagagtgattataaggattcagtgagacaatccatgtgaagcgtggggcctgacacacagagagtgctccaggaatgtcagctactgtttttagaagtatcactagctagtgtggtgccctaagcatgtaaactgagtaatgctcttggctgtgttcattcattcattcattcattcgtccatttccatcaggaattgtaaagaacaggaggtcctaatgactttagatgtccattaaatttaaatgaaactaagtactgatctgctgaccctgactcaaaggacgactggctgaatttgggcagcagatctagcgaagactatacagtgaagttcccaagtcagcgtccactgtccttccaagccacgcttttgcgcttcccttcccgggagcatgtctgtgggctcaaggcccactcactgccacctccccatgtgatatgctgggggttccctctgtggccccagtagaccacctccgaggtgatgccaatggctgggagactggattgtttgaccccatgactccgatgctcagtagctcacactctctgagaccaagagtggggaacagtgaacaattggcagaaagcaggtggaagtcaaaggattttctgaggataattggccaagttactgtgttagattctaaagcacattcgtgaagctccgggagagagaatatcagggaaactgagagcctagatcaatgtattcaagggcgtagggatcgtaagatgaacaatgatggctcaccacactgtgggaatgtttcatggtgtgtggactagtttctaaacatgtacgactcggccggccatgatggctcacacctgtaatcccagtactttaggaggctgaggcgggtggatcacctaaggtcaggagttggaggccatcctggccaacatggtgaaaccctgtctctactgaaaatacaaaaattagccaggtgtggtggtgggtgcctgtaatctcagctactcgagaggctgagacaggagaatcgcttgaacccgggaggcggaggttgtggtgagtcgagatcgtgccattgcactccagcctggtgacagagcaagactccatctcagaaaaaaaaaaaaaccaaccaacaaaacaaaaaaatcatttatgactctccacacctccatgaggaaggtatatttatatgcattttatgggtaaggaaattgaggttgagccagaatgaaagacttatccaaggtcactgaatcagttaatagcagagcaaagtccactccacagcaaatctcccagcccaggaagatgccaggggttctgacttgcagggtgttctcaggcacgtggcagagcatgttcagttcagcagctgcttggccccattcagcgcaaggtagagttaatctcagctgggaggagtagctcacacctgtaatcccagcactttagaaggccagagtgggcgaatcgcttgagcccaggagtttgagaccagcctgggcaacatggcgaaaacccatatccacaaaaaattaaaacattagctgggcatggtggcacgtgcctgtagtcccagctatttgagaggctgagatgacaggatagcttgagcccaggaggtcgaggctacagtgacctatgatcatgccattgcattccagcctaggtgataaaatgagaccctgtctcaaaaaaaaaaaaaagtcaatcccagcaaagagggggatctcaagcttgtaccccttttttccctttggaggtatcctctcttcaccaggtacttggccatactccgcaagtccagataaagatattctgtcctcttttaaaaattatttttatttttttttgagataaggtctcagtctgtcacccaggctggagtgcagtagcgcgttcttggctcactgcaacctccacctcccaagttcaagggattctcctggctcagcctcctgagtagctgggattagaggctcccaccaccacgcctggctaattttgtactttcaatagagatggggtttcgccatgttgtccaggctggtcttgaatttcctgaactcaagcgatctgcccgcctccgtctcccaaagtgctgggattaaaggtgtgagccacgacgtctggctattctgtcctcttttaaatgagctccagacgccagtgagctgaaggagctctctggggagcactgtggtcctggaaacacgtgcttgagacacctcccctcagaggttcccgagctgacgtcttcttccaggcccagcacctgctggccgccgccccaactctttttccagagctgttccatccttccctgccttctgcctgtagccttcaggtttcttgggctttttttctatcattatttacatgatttttgttagcatttcatgatttttttcatatcttaattcctgttattggacatcctggagtactcatgtcctccgcgttggatcccacgcgataagcatctgtgatgaaatgcccggcacagtgcctgccagatagtagaacttcagtacgtattagtgggatctggaatgacatttctgtcaaggaacgtcacattgcactgtctttggggcacatctgagggtctcgcacatcctgctcattcacttaaacattgacagctctcacttggtgccaggtctgatgctgggtgctggggacacacagctggatatcttggaaggcaggagagaaggagggggcattctggtgcagggttgtgttggcaagactggcgcggggggcgctgggacacagctgggggtgaagtagcaaaggcaggccagggcagctcacaggctgcttctgaggctgaacctgcagatggccacagagctcagagaaggggcctggcacgtgggagatgagttactgagataatccaggcaggcaaagcctgctggaggacttggggacttgcagttttggcaagtggtaggagggagttgctgaggaggatgaccgggggatgtgcatctatagaggtcaagcacagagaagggggttgcatgctctgccctctgggaacttctagaggagaagacacaggaattcctccagtgcgtgcaaggagtccccatacccactccccaagtacatgaacttctaggactttggaagctcagtgagttcaccagtccctggagaacctccatgacggcatgcctgcctcgaatggaaaggctgcccatctgctcttcaccctcctctgctctccatcattctccttttcccttctgtttgggcagcattaaggagggcatagaccggaccgtcctgggaatcctggtgtcttaccagatcaaggtgaagctcacagtgtcagggtaagtgtcccggcaccaaccctcgggctgctctgtcctggtcttagatggtctgaacttttcctttcctgaatgactgggagacagaaagcaaggaaaggcccatagcttctaccaaggattaccaagtagagcttgggagagattctgtttgtctagtaccatgcttctgtctgataaaatgtcaggtgggaaagggtggagaagcagactctgaaatgtgtgcattcttagcgccactttgcaaaaatacgtgtgcatatgtgcatgtggtagaagctgatgtgcaagaatgaggattagtcaaatgttatccttcagaaaagaataactgctgtgaaagaactctcagtaaatcttcatgtttttgcatcttagaaggtatccatccataaagtggggactttcccctcccctctcacacatgtaatcacagggcacaggagtcttcttttcatacaagagtgccaatatctcagagttttaagggaacaggtttccactttcattttcatgtgaagccagtttcttccatttgtttaatcttaccaaaagggaaaaacttgaattctcattttcgtttcaaattccattgccaaaggctctggccttttacctggatgagccttgggtagttctgccatcaaaggcaagtctgtgcctaggtttcatacttctaagtagtaaagaattcccttgaggaaaataagcgtttaaaaagagtttcccaaatttctaacaaagtagaacatgggtctattttgcatttttcgttagcatagtgtttttttttttttttttttcactgtggatagtgcataaaaggatctaaaaacagggtggagtttcttttagcagtcaaggaaagcaaccagcaggtatttcacaatgacctcttgtgacttatcttgaatgttagggcttgactttttttttttgagatgtaatctctcactctggagtgcagtggcatgacctcggctcactgtaacctccacctcccaggttcaagtgattctcctgcctcagcttctgagtagctgggattacaggtgcccaccaccatgcctggctaatttttgtatttttagtagagacggggtttcaccatgttagccaggctggtctcgaacttctgacctcaagtgatctgcccacctcagcctcccaaagtgctggattacaggtgtgagccaccgtgcccagccaacttttttttttgagacggagtcttattctgtcacccaggctggagtacagtggcatgatctcagctcactgcaacctccacctcccaggttcaagcaattcccctgcctcagcctcccgagtagctaagattacaggcgcctgccaccatgcccggctaatttttgtatttttagtagagatggggttttaccacgttggtcaggctggtctggaactcatgacctcaagtgatccgcccacctcggcctcccaaagtgctgggattacaggcatgatcccccatgcccggcctttttaaactaatcatcttgagaaagagatgaagtcacaggtaatgaagttgaacattaagggatgggaagaccctggatgttgtgagttcgggtgcaagggccatgagagctgggctgtgtcctgcctctgaatcatgggaaagggtcgtgttaccactgtgacagttaacgacaggcgtttgtttgtgttttctagctttctgggagagctcacctccaggtaagcctgttcaccttccttgtttgattgtttctcaagatatcaaaggcagcaaacttggggctccaaaacggtttctgatgaaagctgctttctggacagttgtgctcagaggtgttaggaatgatgctttgccttcggatgcatcacagaaccgtggctcataggcgtttctttgggaccagatttctttgggaccacagctagacctatgcctgggtaaggacacacacatacacacccagaaaactggcacactccatgcagccagcttgtgtgtgtgtgtgtgtgtttgtgtgcggtaaaatacacataacataaattttaccattatattatttattttattttttgagatgtagtctcactctgtggcccagcctggagtgcagtgacgtgatctcggctcaccgtgacctccacttcctgggttcaggcaatcctcccgcctcagcctcctgagtagctgagattacaagcgtgtgccacaacacctggctaatttttgtatttttagtagagacggggtttccccatgttggccaggctggtctcgaactcctgacctccagtgatgatcctgccttggcctcccaaagtgctgggattatagatatgagccaccacacctggcaaattttaccattttaaccgttttgttttattttattttattttattttgagacagagtcttgctctgttgcccaggctcgagtgcagtggcatgatcttggctcagtgcaacctctgcctccttggttcaagcaattctcctgcctcagcatcctgagtagctgggattacaggtgcacgccactatgcccgactaagagctgagatgatgcagtacataacctcaatgcctgtctcaaatgtttcttaacttgctgctgcttcgtgcataatttaaaaggcagctgtcactatttgcaataccaaaaggtagaaacaacccaaatgtccaccaacagatgaatgggataaacaaaatgtggtatatccatgcaatggaatattactgagccataaaaaggaatggagtactagtacatgctacaacatggataaaccttatactaataacactacgctaagtgaaagaaaccaataacaaaaggccacatattgtatgaatccatttacacacaatatccagaacaggcaaatctatagagatagagaacagattagtggttatgccagggactatagggagggaaaatgagagtgactggttaagggggatgagattttctttttgggtaataaagatgttctagaactagatagtggtgatggttgcataacagcgtaaatgtatttaatgccaccgaattgtgcactttaaaatgatgaagctgggcagggtggctcatgcctataatcctagcactttgagaggctgaggcaggtggatcacttgagatcaggagttcaagaccagcctgggcaacatggtgaaaccccatctctactttttaaaaatacaaaaattagccaggccatggtggcatgcatttgtagtcccagctactcgggaggctgagataggagaattgcatgaacccaggaggtggaggttgcagtgagccgagattgcgccactgcactccagcctgggcgacagagcgagactccatctcaaaaaaaaaaaaaaaaaagttcccactgcattgtctttcagcttgggcctggggatcttttgtgactctccgcagccataggtctttgctgtgttacttacaattgtgtgtatgggtgttcacaccaatcttcattctttttttctagtgaagtcgccactgaggtcccattccgcctcatgcaccctcagcctgaggacccaggtcagttatgtccttttttagctttctttaattatttgctacttgcagatttattgttgatgtatttctagtctttcttgaccgcatctcagagcatgggagtggccaggtgtaagagattccatgtgatctacaaggtgaatagtctggggggaagggagggcccatctgttcagcgctgagccgggtagattatccaccttcagctggagtctgcaagatgtagcatccttgctcttggacagggacaatctcgtgaggttttatcatgaatgatttaagagcagaagctctgctgtcaacagacctggatttagaattaaagatgatttaggtaaaaacttaattttagagcacgaggattttgcatttcatttggaaacaaaaggcctcatgtttcatttgaaagcattaacagacatttaaaagaagataatttttttttttttttgagacggagtctcactctgtcacccagtctggagtgcagtggtgtgatcaagcttactacagcctcaacctcctgggctcaacccaccctcctacctcagcttctgaagtagctggaactacaggcataccaccacccttagctaatgtttttgatttttagtagagatgaggtcttgccatgttgctcaggctagtcttgaactcctgagctcaagtgatctttctgcctcatcctcccaaagtgctggggttacaggcatgagccactgcacctggctgaagataactgtttttttttggggttttttttttttttttttttttctgagatggagtctctgtcacccagctggagtgcagtggcacaacctcggctcactgcaacctctgcctcccgggttcaagtgattctcgtgcctcagcctcctgaatagctgggattacaggcgcctgccaccccacctggctaatttttgtatttgtagtagagacggggtttcgccatgtcggccaggctagttttgaactcctgacctcaggtgatccacccgcctcagcgtcccaaagtgctgggattacaggcgtgagtcacggcgcccggcctgaagataactatttttgacagtggcagttatggtaagaatacagaaaatactagaaaagagggtcaggctgggttcctgacacctcagctcatttgaattataaatctactggctcttgtatggatgcgaaatgatgcaatagttgtatgactctgaaaacatataaaaaccactagactgtcgactgtgaaaaggtaaattgtatgatatatgaatttgatctcaatcattctctttctaaaaaggtaaatgaagcagcaaaaataatataggtgaaatctcagaaattctgaagaaacattctctgcatcgaggcagcttagttgacgggaaagaaaaacagatctgtctaaatgagaactctccgtaggtataggaataagggatattttaagtaaaagtggtataaacaagcagggtttatttttctcatactttacaaatagcttttctatattggtagtgaaatgccgtttaaacattagaatgagcccccactattcattttaggttttgtctcaacagtactttgtttcaaaatagctcttccaaatactttggattcagatcctcaatgaacttttccaaaactgtcccttggagaaaaatgtagtccagctatatgttttcagttcatttatgcttgtgtcattaaaatgttactttttcatggtgtgggattaagatgctttctggttcctttcaaggacattaaaaagatagtcacttgaggagatgtcatagtttatgttgggttgttttctggaactttgagtagactttatgccttaattttttttttttgagacatagtcttattctgtcacccaggctggagtgcagtggcatgatctcggttcactgcaacctccgcctcccgagttcaagtgattctcctgtctcaacctcccaagtagctgggattactggcacgcgccagcacgcctggctaatttttgtatttttagtagagatgggttttcaccatgttggccaggctggtctcaaactcctggcctcaggtgatctgcccgcctcagccctccaaagtgctgggattacaggcgtgagccaccgtgcccggcctgacttaatttttttaaattcttttccatatacaactttcacgttccagtcattatggccttaacagtgaacatatcacaatgtcaggatgaaacaatgatcttttgtactgtgagatttctgggagcaaaggttaagacaaatcaccccatggttacaaaattctgatttctagagatatgagatagatatgagatagatgagatttctagagataaatgtcatctctcctgtcttctctgcctagttctcggctccctgagtctaggctggtaggattctaagcagagaaagcataagctatatgtagttaagccctgctggagcctggggaccaagtaatttgtgtgtaataagtgctgtgacatgctaccaagtttttattgtcccctgtcaagggcatctttactgaatccgaagatgctgatttgattcttccttgttgtctacctctgcaaggctgatggtcccgcttagtgtaatttcttcgctgagcactgtgggccgcagggtatttcttgctcaggggatgttttgacaagctagcctctctagggcccctgtacgtagcgaccctcatagacactccctcccagtgctggcttccaggtgggcaccagaggcgagagtaggggctcaccatcaaatcgccgctgtgctccccaaaactaggtgggcagaaagctaaaaaagtacaaaaaccattcaaattaatagcagttagtctggggatacaacacatgtgaaaacataactcaacaacaacaaaatcaatatgttaacagaaattgaaaactttgcggctgggggttggtcctcaagctttaatgcacactctaaccctggggtgctggtgaacgtcaagtcccaggtctcaggcctctgaagcctgacagatggaggtgccagggtgcacatgctcacggcaccctggcgaccctgacctcaatggggtcccgaggacatggaaggagaaatactttgaaaggcgaagcaactggctgggcagggaggccaaggcgggcggaacacttgaggtcaggagttcgagaccagcctggccaacacggtgacaccccgtctctactaaaaatacaaaaattagccaggcatggtggtgggtgcctgtaatcccagctacttgggaggttaagccaggagaatcacttgaacctgggagacggaggttgcagtgagccgagattgtgccacttcactccagcctgggcaacagagcaagatgccatctcaaataaataaataagaaaggagaagcgacatcagagggggcaaggctgatcagggaaagcatcctagagttgagactgggggggtttcatgtgaggaggtgaaggctgtggcacattgtaaaggaagcagtgatttaaaatgcaaggagaggccgggcgcagtggctcacgcctgtaatcccagcacttgggaggctgaggctggcagatcacttgaggtcaggagtttgagaccagcctggccaacatagttgaaaccccttctctactacagatacaaaaattagccaggcataatggcgcatgcctgtaatcccagctacttgggagcctgagacacgagaaactcttgaaaccaggaggcaaaggttgcagtgagcagagattgtggcactgcattccagcctgggtgacagagagagacagtctcaaataaaataaaataataaaataaaatataaaataaataaaatgcaaggagaaaagctgttccagtgggaaaggcagggaggcaggaattacacgcagtgatcatgaactgcatgtatctaggccttatctctcaaattgtaaagtcacctaaaaggtagacattttctaggtacagctatgatatagaatttagactaacaaatgtctctctctccctcttccctgcctcccttttattccatgcttacagctaaggaaaggtgagtgagcctcttgaatgtggccctgatttgtcctatgctctgggaccttctcctccagcacaaaaccctctttgagtctttgcacatatcccaagctctcctgccggctcaggaggcacatccgctacttcccgtctgctccctagtgcttacggcacgcacgcaccattacactgggtgtgcttgctcactctgcgcgtgcctttgttttctcccattggtgctagttaaaggaattttaaacgaagccttgaggaaaatggcgtgcccccatgttctatcatggggaaaaccttgatcagttccttcgttgcaaaaagatcaaggatcttgtttcagtttcagcttcaaagggcgtgcaatgatcaaaatgttgtttgttttattttagttatcaggatgcaaatttagtttttgaggagtttgctcgccataatctgaaagatgcaggagaagctgaggaggggaagagagacaagaatgacgttgatgagtgaagatgtcggctcaggatgccggaaaatgacctgtagttaccagtgcaacgagcaaagccccacagtttagtcctttggagttatgctgcgtatgaaaggatgagtcttcttccgagaaataaagcttgtttgttctcccctgggtcatgagttggttgatttgttggggaggctgagttgatgacatgacacaagctgccaccattagggtccctggagtgggagggttggggagagggaggccagcctcccacggaagggctcaccactcccatgagggagagaaggcgtctggaaatcaatgtgctcaccaggtggggccctcggtgtgtccaggggctttcctaggagtcccagtctgagctgtttctctggaaacagtgccttcccgtctgtccgtctgtccttccttccttccttcctttattcctccctccctcccttccttccttcgtttcgctcttgttgcccaggctggagtgctgtggcgtgatctcagctcactgcaagctccgcctcccgggttcacgccattctcctgcctcggcctcctgagtagctgggattacaggcgtgtgccaccatgcccgcctaattttttgtatttttattagagacagggtttcaccatgttagccaggctggtctcaaactgctgacctcaggtgatccacccaccttagcctcccaaagtgctgggattacaggcgtgagccactgcgcctggccaccagtgtatgtttctaattacctgaccagtcccaacttccaggcccctaaagagcctcctaagttaaatagggcagagaacatctgtggacaaaaatactcttggttaatgattcaacttttgggtccaggtgtctgtttgagctttgggttgttggtaaagttctattcaatgcaagaagcaaaatcagatttggttaaattaaggtggggagaaggaatgtagtgggaggaccccggtgtgatcagagaactgaaggacaaacctgagctgccacacctggggtaagcaggaatcagagaagcttcaggggtcagggacccactctccagggcggctcttcatgcagctcagcaccatacgttcccagctctgcgtctcttggtcccagtgggcagttattgggaaggagaatccaactggctcagctttggctgggaggatcaacaccccgtggtcagcgatggcagagcccagccctggagatggagagtcccagaaaagggggttgattgtgagtcacatgggcttacttagagcgtgcttcactgagactgggcgtgagaggcataggggagagcactctgagtgtcagggaggaaggtgaactgcaggtggaggagggataatagaggtgataccagggcctttcctttgtggggtcccttcctgccctgaggtacccaccgggcctgctgctgatggcacagatactgaacaggctcatggcggccaaggagaggatggagatgcataggctctggtccatctctggtccatgctttaagggagcagggtaaaggggggttggagattcctccacagttcaacccactcacagaaggcagagggtgagtgggaggggttctagatggggagtacacgtggatcaggcttctgggatggaacatggcgacagagggctggccagggtatgggttccatacacatgaaggttcccagcatctggggttgttcagaaggattccagctgttcgggtcctggagattgggatttagatgaggaggctccacttgggaagcttggatgggatcccagacaaagcgaggtgtggacccgtgtgctggctcacgcatcctggcattgggaggaggatttataatacactagactacaggtggaagattggtccttcaggctgcgagttagcaggatcagacacagtccctcgttctttttctctctatgctaaggtaatggtgcacgaccatttcaacccatgctcccctcagggcacgcagacaagggatggccagggtggcacactcctctgaggattcccaaagctgttccccattgcactgagcccttcccctgtcctctgccacagcacacaggctgctgtgtttagctcctgctagagctcttgggctagcccagggcctgggattctgccctgtggtgcctggtgagaggaccagcccgttggttcctgcattgcttgaccccaggacatcctaagtcagggtggacgttaataagcccgacctttggaactacgtgggtgagagagctggagggaagggctggaagaccaatccctggagagcagaggtcagcacagcccttaccctcctagttattttggtgccaaaatgtctcgatacgccctccaggtgctggcttgtttatggcctgcagctggccacgctggggagggagttgggggaggaagcgagcagccagctgccctgagcagaaagtggaagcttggctcagctcagcctgcacatgtgtggggctgtctactggcatgtagtgtcccttggtatcaggaggcaggaagtctacgtgcaggttgaatgtgtggcccagagtttttgggacagatgcagtgcaagaaacggggtacagagcagttgaaggtgctgcatggagaaagttctgcaaccagcaatgaagggctggagaagggggatggatccctgctattgatggagtgcctaccttgtgccaagtacttcacatctgacatgtaaccatttcagtagtacttataaatcagtagcatcattcatatttcttagatgaggaaattgcggttcagaaaggttatgtaccttacacataggtcacacagctagtgagagtcaaggcttgaatgctggtgtccctgagtctataactagacctttgcccactgtatggtgctgaatggaagtaggagagtttggtggagtggggggagggagattagcatttaggattcaacaacaactgcccttggcccttgctattttttttttccattgaaattttcaggctgggcgaggtggctcatgcctgtaatcccaggactttgggaggccgaggcgggcggatcatgaggtcaggagttcaagaccagcctggccaacatggagaaaccccgtttctactaaaaatacaaaaaattagctgggcatagtgacaggtgcctgtaatcgcagctactcaggaggctgaggcaggagaatcgctggaacccaagaggtggaggttgtagtgagcccagactgtgccattgcattccagcctgggcaacagagcgagactccatctcaaaaagaaaaaaaaaaagaaattttcattgagagacttgcacattcacatgcagttgtaaggggtaatacggagagaccccaggaacgctttacccaacttcctccagtggcaacatcatgtaaagctacagtacaatatcccagcggggtatcgacgtgggtccagtctgctcatctgactgagatctccacaactggatttgtactagtgtgtgtattcagttctctgcaattttgtcacatgtgtggttaattcctttttagggtgtctgttttcctactcctttaacatttaaaaaacctttcttccttccagtttcatttcacaggactgagtcgcatttactgatctttgaggagtagggcaggtgcggggtgggagttggggacatttggaaatgtgtatggtggtttttggttttcacatgcttggggaccagaagctctatgtcacatgcagtggagaaatgtgctgctccaaatgacaatcatgaccctagttcagggtaaaaattggatgattcccatgttttcaagtttcccttttatattctccaatgtgaagtggttctttctgacaggagttgcgcctcttcactgacgtgtcacaaagaagaattaggttggacgtgaagtgtgttattactgccatcttgatatgccctcaaggtggggtagactcagggagcaggctgtcgttagagatgattcatagtgtgactcattcaataaagaggcaccggagggaatgtgctcttccaggccaccgctttgggggagttgatgtctcagcccttcctgagatctccaggggaacagcgctgtgcgctcaccaggagaacaaaaaagctgcttcatcatcaaagaacatttatgccagttttctttgctttaagaatataattcttaccaagcctaatcctctttttttaaaatacactttttattttgagtagttttagatctacagaaaagttgcaaagatgttatactgaggtcccccacacccaaaaccccctattattaacccttacatgagtagggtacatttgccacactgagtgactcaaatgttgtttccagtaaaatatacttatttctttccaacttttattttaggtccagggggtacatgtgcaggttttttacatgggtaaattgcatgtcatggcggtttggtgtacagatagatacttttgtcacccaagtaatcagcacaataatccccgataggtagttcttcaatcctcaccctcctcctacccgggaatcaatattgatgcattattattaaactaaagccccatacttaattctgatgtcctcagcttttacctaatgtcctttttctgttctgggatcccatctaggaacccacgtgacgtttagtcatcatgtctccttggctcctcttgtctgtgacaatctcagtactttctggtaattgcagatttcctcctctccagccacggtttctgcttcttaaccgtcacgttcatgcccttgcctccttgactctaaaatgatgagttctggggcctggatgtcccctgagctcctaacaggtgtaggcaacagcatttattattattattattattatttttgagacggagtctcgctctgttgcccaggctggagtgcagtgacacaatctcggctcactgcaacctctgtctccggggttcaagtgattctcctgcctcagcctcccgagtagctggaactacaagcgcccgccaccacgccaggctaattttttgtatttttagtagagacgtggtttcaccgtgttagccaggatggtctcgatctcctgacctcgtgatccgcctgcctcagcctcccaaagtgctgggattacaggcgtgagccaccgcgcccggccggcaacagcattttaatggcctccctatttctagtcttctctcctatggatcattctctgcccagacacatgagttcctctgctttcccaaacccccttgccagctccagtgcccacgggactgaagtccttgcctcagagcagggccgggaggctactctgcatcctggcgccgctgctcacctccctgcctcccgcacccgccttgctaccggcttcaccaaaatccctcgtcacccgctctgctcacctggtaggggtagtctccccgtttttgcgttttcctgggaaactcccttcatatctgacctctccattccaatcccaaaccctgctcaggtcacccggctcccccgcggaatgaaggaatgaactgtttcttcccctgtgcgtccccgcccctcctccgccttgcacactcctccagggttttgcctctgtgtatcactccacatgtagttaattgatagaaaagtcccaaccctgtggggaggctggagccctttgtgcctgcatgagttccctagggctgccagagcactgcaccataggccgggcggcttccaccacaggaattgacgctctcggttctggtggctggaagtgcgagatcacggtgtcggcagggggagttccatcggaggcctttctccttggcttgtagatgccatcttctccctgtgtcttcacatgggctgccctctgtgtgtgtctgtgtcctcatctcctctttttatgaggacgccagtcataccggattagggatcacccctgtgacctcattttaacttcattacctttttaaaaaccttaactccaaatgcagtcacatgctgaggtactgggggttaggacttcaacatatgaattacgggaggacacagttcagcatgcgactgtgctgcagaactttctggggggacgggggaagtgttttatatttgtgctatccagcgtggcagctgctaagccacatgcggctactgagtccctgaaatgtggctcctgtggctgaggaacggaatgctgaattctaactaattgaaatttaagtagccacatgtggctagtggctatagtaccctggggcaccatggggccttcggcctgtcccggactgttcctgccttaggccttgtcctcctctgtcctggccgtgagcccatgcccctggccgtgtccccatgccagatgccactctgcagccccaggtcactgcccagggcggcgcggccagcgaatgcctattggcaggcgaggtctctagcggcagccctttgacagggagagggcacacctgggcagtcccttactgatttgcccctcagagcagggcagacagatggacagcatttcctctgggtggcaccaagccctgctccacctggatggcaccaaaaacttagctgatctcatctccagcttcgcttcctcctcttctgcccagagcagcgctggaccccacccgcccaccatccagcagcccccctgggaaacatgggactcgttctggtcacctctgtctccctccagtcgctggtcactccccacctggatctcagtccacgtctctatctctcagcccctcggtaatccagggcgtccacctgccctgataacttcaaagcccggatcacaggccccagcgtggtgacccagccccgcccagggttaaatccctcaagggcttcctgctgccttccatccccttatctggtttccaaagcccgcttcgacctgcccgccccgaggctcatatcttaatgccattttccttgctctaagcaccagcttccctttcttcccccgtcttcgcccaacactcgttctttcttgcctccaggcctttgcacaaatctggtctctgcctagaacatggttccctctctagtcacaactcctgctcacattttccatctctccttaagaaccgttttctccaggaagccttcccagatggagcggtgcatcccagctctggcgtcccgaggcccgtcccagtaccggggtctctttccagcacgcgcgcgcgcattcgagctcgccccaaactcggccacacaaggctgggcaggacagacacagccccagcctgcctgaggttacctacattctgatgcggaagagtagagatgttttaagaagtgaatatagaaacaagaacacaaacggcgttccagaaataacacacagaagccacggcccggagaggtgggcggggggcccgggacgcttcaggtgggggcggggaggggccgcgcggcgccgtctgcagctgcgcgcatggccggcagggggcgcggcggggagaggcgggaggccgcccccaccgcccccggcccggcccgccctcggccccgcccctcccgccggccccgccccgcccccgcccgcggtgcgcgcgctggcccggcagcatggcggcggcggcgggcgcccctccgccgggtcccccgcaaccgcctccgccgccgccgcccgaggagtcgtccgacagcgagcccgaggcggagcccggctccccacagaagctcatccgcaaggtgtccacgtcgggtcagatccgacagaaggtgagcccgcggcgcggcggcccgggcgcgcgcccctcacgccgcggcagccccggccgaggcccgtggccctgcccgagcggccgcccaggcccggctcggcccggcccggggtcccgcgggcgtcaccgcccctgtcgagcgtgccccgccgctgtaacgggccggcgccccgggcggagcgcgcggcccccgacggacggcgggcggctgtggggccgggcggggggcgcgcaggtgggcgccccgggcgccgcgcgctgggcggggggcgcgcgccgagttgggccgcgaggacccggaggaaactgaggcctagatgcaggggactgcgctcgtgccaccgagcgggtcccacgcgggggctcccggctgcgccccgcgggcgtccgcggtccccaaaccccggttctgcacgtttctcaggagcggtcgggtggtgtcccgcgagtgccctgcagacttccctgtggtgccctcagaagtccgctcggacccgggtgcgagggatcaccccttcaccccttcatcccaaaagggaaggaagggatgcgcgttcagtgaccgtctctctcagcaaagccgggaccgcgcacccgcttggcacccaactctccacggagaactcctgacgctaaatgttagataaagacgcacgtcctttttgcaggaggaaagttgcaccgtttgttttcccattgtgcttcctattgaaaacagcttacggtttttgctccaggtgagcccgcccggttagaacactgcttcctcaggcaggtggctggacaggtggctgcgagcaggctgggtccctggggcagctctggcagatccggttggcacggactttctcctcctgctgcagtgcgcttttcctccggggcggattaggttcagccgttcccttcaccgtgggagccttctcttctgtcagcctttgatacctgcgatgggggaacctgaggtcctaacatgttacaaacaggtttgttgtgaagtgctccagttattcagcaaataggtaccgaacacctgctttgttccgggtataacagtagcagtagtgatgataatgatagcaatagcaaataacaattctttaataagccttctatgtgccaggcactttcttgggttagctttacagcacttgacatggttagtttattagtactggtgagaacccaataagttggatgctatcatctccgtcttttggaattggaatagaaatagaatcaaggttaaatgacttgcccagggtgtcacaggtcgtaaatgtggatgtgtgttggaaccatggtcaggaccgtaagatggaaggcagtttctacacctagggattctcagtctagttgggagatggacgcctgtgcacctgacatgacaacattgtaagtgccgcggaaactcggggcagagacctgccctggggaggcaggagtggtttcctttaaggtgagatcttgagggataaagaattcaccaggctaagtgggtaagaaatggccttctacatatttgaacgttgcgtctagagctttaggcacaactgcgaaatgatcagaagttgggccagaggtggatcacgttgattagacttattagttggaagggttggttagggctgaatttcgaaggggtggtcctttgaggggtttgctttttggccttgggcaagaggtggccacagaggattgttcaaagtatgggggtgatggatcagatgtgcttttgggaagatctccacatagccctaaatgatactgataggagttgctttctcctgttgcccaggcaaggtactgaccagtgtggggtagatcatgtgatttacaaggttgattaagatcaagattgtgttgagagagatttgattcctgggagattccagtgtttagaattttgttggttaggaggtgtttttgctttccttcttttttctcctaaaacaatagctgctataccagctgttctggttgaggaggagtgatgggtagactgttaaaaatacaccccgaggacttagagtttctgaatacagtcacatctgctgtacagatagcttaaggctgatttttcttctgagttgttaagagattgtcagaatgtgggaatgcgaggttgactgtatgtaatagctccattttttttttttccagcagataagccattcacaaaattcctctggtatctatggtacataatagaaacatcaaaaatggtatggggtagcagtctgagtctaaaaagaaaaacagaactcaccttaagtatttggaacagaaggaatgtaatctaggggagtggtcacacaggtgatgtgagaactgagaatgcaggctgcaatgaggcaagccggagatgaggcaacaagcaggaaactg

SEQ ID NO: 59 - DNA, 1564 bp, Homo sapiens
cccctacaaattccccacatacgtaggccaggagcctcagcggtgccccttcaggctcatctggcaagacggtaccagcttgctcagaacaggggctggctattcatcatctcagagcatagagaccctctccttgccacccggcccttcccacctggttggtgacaaatcacaaggtggtagaagttgccagggacagataacatggcagccagcgggaagaccagcaagtccgaaccgaaccatgttatcttcaagaagatctcccgggacaaatcggtgaccatctacctggggaacagagactacatagaccatgtcagccaagtccagcctgtggatggtgtcgtgttggttgatcctgatcttgtgaagggaaagaaagtgtatgtcactctgacctgcgccttccgctatggccaagaggacattgacgtgatcggcttgaccttccgcagggacctgtacttctcccgggtccaggtgtatcctcctgtgggggccgcgagcacccccacaaaactgcaagagagcctgcttaaaaagctggggagcaacacgtacccctttctcctgacgtttcctgactacttgccctgttcagtgatgttgcagccagctccacaagattcagggaagtcctgtggggttgactttgaggtcaaagcattcgccacagacagcaccgatgccgaagaggacaaaatccccaagaagagctccgtgcgattactgatccgcaaagtacagcatgccccacttgagatgggtccccagccccgagctgaggcggcctggcagttcttcatgtctgacaagcccctgcaccttgcggtctctctcaacaaagagatctatttccatggggagcccatccctgtgaccgtgactgtcaccaataacacagagaagaccgtgaagaagattaaagcattcgtggaacaggtggccaatgtggttctctactcgagtgattattacgtcaagcccgtggctatggaggaagcgcaagaaaaagtgccaccaaacagcactttgaccaagacgctgacgctgctgcccttgctggctaacaatcgagaaaggagaggcattgccctggatgggaaaatcaagcacgaggacacaaaccttgcctccagcaccatcattaaggagggcatagaccggaccgtcctgggaatcctggtgtcttaccagatcaaggtgaagctcacagtgtcaggctttctgggagagctcacctccagtgaagtcgccactgaggtcccattccgcctcatgcaccctcagcctgaggacccaggtcagttatttatcaggatgcaaatttagtttttgaggagtttgctcgccataatctgaaagatgcaggagaagctgaggaggggaagagagacaagaatgacgttgatgagtgaagatgtcggctcaggatgccggaaaatgacctgtagttaccagtgcaacgagcaaagccccacagtttagtcctttggagttatgctgcgtatgaaaggatgagtcttcttccgagaaataaagcttgtttgttctcccctgg

SEQ ID NO: 60 - protein, 374 aa, Homo sapiens
MAASGKTSKSEPNHVIFKKISRDKSVTIYLGNRDYIDHVSQVQPVDGVVLVDPDLVKGKKVYVTLTCAFRYGQEDIDVIGLTFRRDLYFSRVQVYPPVGAASTPTKLQESLLKKLGSNTYPFLLTFPDYLPCSVMLQPAPQDSGKSCGVDFEVKAFATDSTDAEEDKIPKKSSVRLLIRKVQHAPLEMGPQPRAEAAWQFFMSDKPLHLAVSLNKEIYFHGEPIPVTVTVTNNTEKTVKKIKAFVEQVANVVKSDYYVKPVAMEEAQEKVPPNSTLTKTLTLLPLLANNRERRGIALDGKIKHEDTNLASSTIIKEGIDRTVLGILVSYQIKVKLTVSGFLGELTSSEVATEVPFRLMHPQPEDPGQLFIRMQI

SEQ ID NO: 61 - DNA, 1555 bp, Homo sapiens
cccctacaaattccccacatacgtaggccaggagcctcagcggtgccccttcaggctcatctggcaagacggtaccagcttgctcagaacaggggctggctattcatcatctcagagcatagagaccctctccttgccacccggcccttcccacctggttggtgacaaatcacaaggtggtagaagttgccagggacagataacatggcagccagcgggaagaccagcaagtccgaaccgaaccatgttatcttcaagaagatctcccgggacaaatcggtgaccatctacctggggaacagagactacatagaccatgtcagccaagtccagcctgtggatggtgtcgtgttggttgatcctgatcttgtgaagggaaagaaagtgtatgtcactctgacctgcgccttccgctatggccaagaggacattgacgtgatcggcttgaccttccgcagggacctgtacttctcccgggtccaggtgtatcctcctgtgggggccgcgagcacccccacaaaactgcaagagagcctgcttaaaaagctggggagcaacacgtacccctttctcctgacgtttcctgactacttgccctgttcagtgatgttgcagccagctccacaagattcagggaagtcctgtggggttgactttgaggtcaaagcattcgccacagacagcaccgatgccgaagaggacaaaatccccaagaagagctccgtgcgattactgatccgcaaagtacagcatgccccacttgagatgggtccccagccccgagctgaggcggcctggcagttcttcatgtctgacaagcccctgcaccttgcggtctctctcaacaaagagatctatttccatggggagcccatccctgtgaccgtgactgtcaccaataacacagagaagaccgtgaagaagattaaagcattcgtggaacaggtggccaatgtggttctctactcgagtgattattacgtcaagcccgtggctatggaggaagcgcaagaaaaagtgccaccaaacagcactttgaccaagacgctgacgctgctgcccttgctggctaacaatcgagaaaggagaggcattgccctggatgggaaaatcaagcacgaggacacaaaccttgcctccagcaccatcattaaggagggcatagaccggaccgtcctgggaatcctggtgtcttaccagatcaaggtgaagctcacagtgtcaggctttctgggagagctcacctccagtgaagtcgccactgaggtcccattccgcctcatgcaccctcagcctgaggacccagttatcaggatgcaaatttagtttttgaggagtttgctcgccataatctgaaagatgcaggagaagctgaggaggggaagagagacaagaatgacgttgatgagtgaagatgtcggctcaggatgccggaaaatgacctgtagttaccagtgcaacgagcaaagccccacagtttagtcctttggagttatgctgcgtatgaaaggatgagtcttcttccgagaaataaagcttgtttgttctcccctgg

SEQ ID NO: 62 - protein, 371 aa, Homo sapiens
MAASGKTSKSEPNHVIFKKISRDKSVTIYLGNRDYIDHVSQVQPVDGVVLVDPDLVKGKKVYVTLTCAFRYGQEDIDVIGLTFRRDLYFSRVQVYPPVGAASTPTKLQESLLKKLGSNTYPFLLTFPDYLPCSVMLQPAPQDSGKSCGVDFEVKAFATDSTDAEEDKIPKKSSVRLLIRKVQHAPLEMGPQPRAEAAWQFFMSDKPLHLAVSLNKEIYFHGEPIPVTVTVTNNTEKTVKKIKAFVEQVANVVKSDYYVKPVAMEEAQEKVPPNSTLTKTLTLLPLLANNRERRGIALDGKIKHEDTNLASSTIIKEGIDRTVLGILVSYQIKVKLTVSGFLGELTSSEVATEVPFRLMHPQPEDPVIRMQI

SEQ ID NO: 63 - DNA, 1419 bp, Homo sapiens
cccctacaaattccccacatacgtaggccaggagcctcagcggtgccccttcaggctcatctggcaagacggtaccagcttgctcagaacaggggctggctattcatcatctcagagcatagagaccctctccttgccacccggcccttcccacctggttggtgacaaatcacaaggtggtagaagttgccagggacagataacatggcagccagcgggaagaccagcaagtccgaaccgaaccatgttatcttcaagaagatctcccgggacaaatcggtgaccatctacctggggaacagagactacatagaccatgtcagccaagtccagcctgtggatggtgtcgtgttggttgatcctgatcttgtgaagggaaagaaagtgtatgtcactctgacctgcgccttccgctatggccaagaggacattgacgtgatcggcttgaccttccgcagggacctgtacttctcccgggtccaggtgtatcctcctgtgggggccgcgagcacccccacaaaactgcaagagagcctgcttaaaaagctggggagcaacacgtacccctttctcctgacgtttcctgactacttgccctgttcagtgatgttgcagccagctccacaagattcagggaagtcctgtggggttgactttgaggtcaaagcattcgccacagacagcaccgatgccgaagaggacaaaatccccaagaagagctccgtgcgattactgatccgcaaagtacagcatgccccacttgagatgggtccccagccccgagctgaggcggcctggcagttcttcatgtctgacaagcccctgcaccttgcggtctctctcaacaaagagatctatttccatggggagcccatccctgtgaccgtgactgtcaccaataacacagagaagaccgtgaagaagattaaagcattcgtggaacaggtggccaatgtggttctctactcgagtgattattacgtcaagcccgtggctatggaggaagcgcaagaaaaagtgccaccaaacagcactttgaccaagacgctgacgctgctgcccttgctggctaacaatcgagaaaggagaggcattgccctggatgggaaaatcaagcacgaggacacaaaccttgcctccagcaccatcattaaggagggcatagaccggaccgtcctgggaatcctggtgtcttaccagatcaaggtgaagctcacagtgtcaggctttctgggagagctcacctccagtgaagtcgccactgaggtcccattccgcctcatgcaccctcagcctgaggacccagctaaggaaagttatcaggatgcaaatttagtttttgaggagtttgctcgccataatctgaaagatgcaggagaagctgaggaggggaagagagacaagaatgacgttgatgag

SEQ ID NO: 64 - protein, 403 aa, Homo sapiens
MAASGKTSKSEPNHVIFKKISRDKSVTIYLGNRDYIDHVSQVQPVDGVVLVDPDLVKGKKVYVTLTCAFRYGQEDIDVIGLTFRRDLYFSRVQVYPPVGAASTPTKLQESLLKKLGSNTYPFLLTFPDYLPCSVMLQPAPQDSGKSCGVDFEVKAFATDSTDAEEDKIPKKSSVRLLIRKVQHAPLEMGPQPRAEAAWQFFMSDKPLHLAVSLNKEIYFHGEPIPVTVTVTNNTEKTVKKIKAFVEQVANVVKSDYYVKPVAMEEAQEKVPPNSTLTKTLTLLPLLANNRERRGIALDGKIKHEDTNLASSTIIKEGIDRTVLGILVSYQIKVKLTVSGFLGELTSSEVATEVPFRLMHPQPEDPAKESYQDANLVFEEFARHNLKDAGEAEEGKRDKNDVDE

SEQ ID NO: 65 - DNA, 17119 bp, Mus musculus
atgatgaacaagttccctgccagtgtgaggagatagatgcacagggtcccaaggaaggcaagaggtcggagggcaccagaggtagtgaaaccagcaaggatgaaggtccgtgtccaggtgtagttgacatgatccatggttccaaggaggagggggagttaaggtccaagattaactacgccaggatcttccatctctttgtgaaatactcctagagtcaagagcagcaactctgagcacatggctgaggttggacattatctaattaaatccctatgttgtgatactggagctgcagcctcctcccatccccattaatgtgaaatgattggtttcaacatcagtaggtggctgggctagaactagaaatgaagacacctggtttattctcctgagtattctactcctgatctcttgagtgtccaccaacacagttctcccctatcccactctcaataaaaggaaatggaacctttttactgtaatctctcctatgacttctatgttttctggggactctgtgcatctattttagaataataaaataactagaagtgttggtctgttctaaaggaaggcttgatgtctacagaaagttatcgtgacttttttcaggaagtcttatacttcattgactattctggtagggaaagattaagtgatctatgtctgacaatgatgcagacactctaagattaatctctaaaatataatgcccatgaaatgtaatggttattcacttccaggcccatcatatacaatgattattcaattctagacccatcatatacaatgattattcactaccaggcccatgatatgccctgattattccctatcagtcctatgatctcctatgagtatttactatcagtcccacaatcttctatgagtgttcactctcaggctcacgatatctactgattgttcacccaacattcataccgtaccttctaaaagttgagcttcatgagagacagatgacatgaattttcaaagaagaaaagtgtgagtcagaatccccaggcagaaaagaaactttgcagtagctgtgaattggctgcatgcccttgctctgacacaccccagctgtacactctgaactaggggattttttttttttacttaaccaacttcctgtttcctaaaatgaagaagaagaacaagatttggcagttggtttctgaaactgttatgagttctgatctccctaggatattgggaaatgattgtgagttttgtggttgggttttccttccataacctgaggctactcactaggaaagatcaaaatcaaaactcttgccttattctcttctggtaatctcctacactctaccaccgtcatctatcacctgaccatttggtggcattagcatccgtgtcatccccctaatggcaattccgatctctatctacttatatgaaacggtcctggaaaggctgctttcccagaggcccctcgttgggtgttccctggagctgtgagtatgatgagctctcagaatccctctggagcaagaagttgggtagagagaagtgaaacagcatttctattcctaagatgacttctttgcttcttgctaccagggatgatgcttttgtcgtgaaatctatccttcttaagagacaactaattaatagtaaggctgtgggaattgatttcaaaggaagagatgaataattgtttaaaataattttacagagaatctccccctttggttcctttatctctataataataataataataataataattattattattatattattattattattattattattattactattaacattacatccgaatcactgtccccacttctggtcccccctcggacagtgcttactcctatctcctgctgtagcctctcaaccctggcacatcaaatcttgcaggacaaggcacaacctctccaactgaggccagacaaggcagcccagttagcaactcaagagctctgtagcaaaagactgcttaaaaaacaaaaacaaacaaacaaacaaacccaggagatttcatggatctcatctataaaaatgagaacacacttccagaaatgatatgaaaaaaaaatccagaatgtgtaaatacacttacattagtttgcttacaagttgtaaaaacacaattaaaatttattttgatgaatatggtgggtttcaaagcacagaaagggggaaactaggttttaaagttggagaagcactcactcatgttatatgccctgtggcttactttattataaaggatagagttatattatctactggaacaattgtgctcaccttaaaaattcactttcacatgatgacactgtgtgctgctctagtaatcaacaatgagcatttatttgcttgcattgttgggtgactactgaacactccataaaacgtctttaggtcttttggtgtcatcatcaagtatagagcctagagatgaattaatttactctaggagagagtcagcacttcttttaggcgttaccaagtagtgtgctgcttgggtaatattctgttctcctccaaactactgctcaatatagatggttgaactaactgccattaggaagacaaaaagtaaggagaaaactgagttatggtacccatttcacataggcaagaagaatgacagaattctccagggtgtcactgtacatgttggtacaaaggcaagggctgagttgaattattaccagtttgactgacctgcacatgatgaatgtgaaatatataaaagccaaacaagaacctccattatggaatttatatgtaaaaagttcaagtagtgtcttcctcacatagacacttactccccatgtgttttacatgtatcaaatactttaacagatgaattctctcagcttatctactgtcctcatttcacaagagggaaagacaagcaacaaaggggttaagggacaaattcaaagatattaaggagaaaaagcatcagaaataatgatcgaaccatgggaaatgatgtgtaaatcccatttctaagcaccatctgtcgtgtatatggaggaaaggagatctgataccagacagataccctcttaagtgtccagatcacagtcagcaactttgtatgttttatttcttttaatatttagtttgaattcattattatattttatggataagaaaatatagttcagaagagactttttgcccagaattctatgacttaaaggagaaaaatatctggatatgtatagacatattgccctctctttgccacagtcagtaattactcatctaacgctgcatcggatgttttcctttttaaagaagagcagagcaggaaagaaaactcaggaggcagagtgcttgccttgcacatttaaggtcctaagttcaaaatggtgttgcaatcacagaaccaaactttcttaaactggaaagaacctgaaaacacatccacacccaggacatggtttgtagggagtgagagaagccaagaatgttgcaatagagcagccgggattgccaaaatgcatctgatgaatgtgtgtctcttcatatatatgaagttcagtccagaattacttctatatttactttaaataattgtcatggtcttttcttagaaagaatgtgtaaagtgatgtaaaattggatagtggactagataggtggaccagtaggtattagcatctgccactaagcctgaaagcctgaatcctgtctccaagcctcacctggtaggaaataaccaactcttgaacactgttctttgatttctacatgtactcaaatgcacatgtgcaagcagcatgcacttctatgtgtgcacacacatgcaaacacacatacgcacaaacaaacaagcaaaataaactttttaaaaagaagtgggcatctcctggtgtaatacagaaattaaaactattattgaccaaatataaattaactttattaagaatattcaagactcacagactagtctgtctgtctctgccaagctttttctaaggagctgtgcatcctttagagtattatatctcctccttggtttttagttccatcaccagaaatagagctgaagcaagttacctcagaggagaaagttgtgaggaaaccaggtgagcataaggaaggagtctttaagctccaactttgaatttctattcttgtatgttttcacattgcatttataatatttatatgtgtttcttcatatgtgatttgttcatttgtctttttaaaaatggagaagtagagctagggatatggctcagtgggtaagagcactgactgctcttctgaaggtcctgagttcaaattccaacaaccacatggtggctcacaaccacctgtaataagatctgatgccctcttctggtgcatcagaagtcagctacagtgtacttatgtattataataaatggatctttgggttggaacaagcagggactgagtgaatagggcctaccagagtgaatggggttgactagagtgagcagaggtcctaaaaattcaattcccaacaaccacatgaaggcttacaaccatctgtacagctacagtgtactcacatacattaaataaatagatagatagatagatagatagatagatagatagatagatagatagatagacagacagacagacagacagacagaaagatagataaatctttaaaaatggagaagttagtgttttctggggaattttatttcagttttatataagatggataggtccacatcttgctaaggctgtgcagcaatgaaggaaaacaggacccgtgcctacctagtcacattttgataaaaaacacaatccattgttaccatggaaacagtcagcaagactaaggcctcaggcatgtggactcaagcctagacaatggcactgactgaaacctcagtggtaatggtcagaggatgtagaatttgatggccctgcatattctgaatcaagtgtctttaggaaccgtacttaactcttctatttgctcttcactttggaatatttctgactactgagttcactcctgtcttcctttttttctatccaggagatccttctcccactcataaccagctcgttatcacaagaggcaccatttcctctctaaacttataataatgatggcatctttctaaggctttgtgttcttgtgagtacagttccattagtcaatacagtacaaatgatattgctcctatcccataatagtaaataccaatttcaaagttggtatttataaatatatagattctggttaaattcttacaactgacctaaatgggatttaaaaattggagagttataaacatcatttcatctaaccttagttgaaaattcttccagcacagtcagtgtctagtacaggcaagtaactggagcctctgatgtgtatttgaaaaatgaagaatgatgtacatgtatgggacctgtcttgtttcactggagtgccacggaagtaaaagtggtgagcaaagaaaataagctgccaaagcaatactcagggattgtacaaaccctagacatggagaagggagacaagaatgcatgtgcctctctgttcaaaggctcactaacatgaaatgatcctggaaatgtttgagctgagtgtttaaagctactctccactattcctccttttcagtagatctcaggtaattgccttgctcatccctatctttagctggtccaactatttgtttacatatcctgtttccacgacaaggaactttgaccccccactcctggctactgatgtaacacatcacctggctactgatgtaacacatcgtgttggagcattatgtctcacagggaagtggatgaggcagaccttgagcagcttcagaaatcctctcacaaaacttttcctcagagcaactcaggggagcagagtgcaacactaacaagtttgctaatgagaaaacaaacgagttgcttaattaaactggggaagtcagcagccagagcaagggaatagttcccaggaggaagtctatgcccaattaatgacacgggccctcaacttcagtaattatcagcattttctcttcagagaccaccagtgaagaagttacgtagtaggaagctttggggacgtttccttttgcttcttccaattagtcctaattaagatcatgggaacagagaccaagatgtcaaagaagcagttttaggttaagtctttgtaggagtccctttccctggctatgtcagaattgttctccaaatcatgtatttgtttctcatacccattggaggtaataatgtggcttagactggcagccaggccagagtttaaatccagactttccccctagctatcgccactacaaagtgagccacagaccttcccaggacttaacctttaatacacaaaagtgacactttatgacctttatggtgttttgaactctacttctaaactatgatagatgagatagaatataaaagaagtatgataagagataaccccgtcctaatatcaaggtgccagcaacagaagagtcaaatcaagtccagtggattgactcttgattacacacatacatacatggaggagttgggtgggggagagatgtagcatgtgaactcaagcaaattacactgtttctgggtttttttctgctcctttagaacatgttataagctgtcttttctatgaaaagaaatctcatcgtttttatttcaaaaacgtttcaataattgcctgtctttccatccctacttggctgtacactttacatgtttattatgattctgaggtgctactaaaagtaaaacacacaagttaataatatcatagaatattttgttaaaatccttagactttaattctaatcccacacacgatcaattttaaaaaaatttcacacaatttacataatccattttggcctaatttgcaactgaaagtagttgccaagtgcaaaaccaatgggaaaactttgtaaaataacttaagtgaacatacagtaagctgctacaggaatgaaacctaacattgctgacttctagtatttttttaaatttttttattacatattttcctcaattacatttccaatgctatcccaaaagtcccccacaccctcccccccactcccctacccacccattcccatttttttggccctggcattcccctgtactggggcatataaagtttgtgtgtccaatgggtctctctttccagtgatggccaactaggccatcttttgatacatatgcagctagagtcaagagctccggggtactggttagttcataatgttgcaccaatgatcctaattccaaacacacgagatgatctctaaatcttagaactactggcttagagatgagttcagtaaacgactaaaatcctagaggtcttcggttttgtaaacatgtggtgtgttttagaactcattaatctctgacagagatcagatctctgagattttggcaatactcatgacatgatttagactcatctctctttgaaggtctgattctcttcaggtacatgaactgcagtttggcaagggctaacgggccaggatgagctaatatccttcgcttcctggaaggaaagctcagctctgacagttcagcaaatgcagtactgtcttgatgatgtgtagggaaggatcacagcccagaaaagtttaaagcttggcatggaaaataagttcaattactattaaggttctgtcttctctactgtggccttcctcacagacctgaaatacttaacacatgggcagtcacacaagatcttggcatcataaagaagatacttgatatgttttactgcaaaaaatacccagttacctttaaattctatgacgttatttttggattatttgtctttatcgtttgtggaaatttggggtttatagaaaagggtgtgagggccagagagatgactctgaataaaaccatttactcacagacccaattacctctattaattatgctgactcagtgaagtagccggagagttgtccactgatctccatatgatcactagggcatgcatataaacacacgcatgtaaacacacacacacacacacacacacacacacagaggggggatttaaaatgaatgaatggtgtctacattacagtctccatatatactttgctccaactcatgtaccacctccctcactatcagcatttcccaacacagtgagacattctctatatgaacacattgatatgtctccatcagccaaatctataatttgcatgagattttttttctcttcatgttgtacattttgtggattggggcaaatttgtaacattagcatcctatggagcccattgccctggatatgacctgttcttctccttcctccaagtcgatgtaatgcctgacattttttgttggcctccatctacatgtttgcctttctacaatgacaattatttggaactttatgtgaagaaagcatctctcctcaggcccaagcaaaaggctccattctcccagcaaacacagccattcgtttgtatgggtaaactcctgtcattggaagaagtacagtttcttgttggctttaaggtactgtgccttggttggtggaaagacagtctttcagttgcttgcagatttaccctgattggtacaaattttcttggctgcaaacaggacatccactcacttttgagtaagtggaaaacttatcctagtttaagccatgttattataatattaggctccattaaaagtttcactcaactagccttttcttgccttttgtttctacctggtagagagaactaaactggtaaccataagaaaggtaagaagacaatgatcagaagagaatagagtgccattccacagtcaaaactctgacccataattttttctgtctggaaaaactgcagagatggaaatggagacgagcccgaggaaaagaagatctagatacaggcccaaagtgggatccagctcaaggggaggtccaaggcctgacactattactgaggctatggagcgctcacaaaaagggacttatcatgactgccctctgaaagactcaacaagcagctagtcagatgcagatattggcaggcagccaatgaacagaatctgctgacccctgaggttgaattagggaaaagctggaagaagatgaggaggagggtgaccctgtaggaggaccagcagtttcaattaacctaacccccccgagatctctcagacactggaccaccagccaggcagcatacaccagctgataggaggcccccaacacacatacagcaggggactgccaggactggtttcagtcagagatgatgtacctaacccacaagtgactggagtacccagggagtttagagatctggtggggttggggttggaggggacatcctcatggagtcaggggagcagtgaggaggtatgggatgtaaaataataagagggtagaccaagaggggaataaaatctgaagtgtaaaataaaagaataatttaaaaaagagagagagaaaatagagtggtggaagtggcatagaggtgtcagggataaagacaagcagggctatgaagagctgaagcctgagatactgttgactgacttccaggtgcataccgaacagctaccaatccttaagggccaagaattctagcacctcagtcaatgagatatgacaccagccactctcaaggtcccagaatcacaaaggcacttcctgtttgttactatctttcacctgctgcttccagaagttgattataaactcccaaattctgagctggcagttgtggttaaatcccagaaccataaatctccaatccaaaacctcagaaccacacgtctctgacttctgaagggtttggtgcttgtaaatcctggatgtgttagactatttcctaggccttgagtactttattgcaataaaaactctgactcagcggtccatggctcctatctaagtagagcagaagaaccttggtcagggagttttaacaccttgatctgggtacaccatgtatgtgagttttgtgtctggtggccagtgtatatatgactgctacaaaaatcaaaaggttaggactttcttatttagtgagattcaacagaaaagaatgtgagcctgactaagctgtgatttttttttcccatagtgaccacagtgtttaagggaagctaagaggtttcccaggccagggaaattgaaagctatgaacaaaactgggaggaggcctggctatttcagcactcctcacccgagggagacagcacagtgagagacacccagtgctgctcaagaagtgaaacaactctgagagtatcctaaccactggtgtcttcctttataccccatttttcactttctcagttactgaattatctgcctacctactcaaaccaagcaggccacttctgttgttgaagatctcagcacctgtacattgctgccgaaattccagggaggtgagtcctgtctgtttcttaaatatatgatcatatctatctgtggaatataaaggaacatagaaaaaaaatcagtattggagttggcggggggggggggggggaagccggggcggtagccagggctagtaccagctgcactcacagccttgaacctgctgtagctggtttctgatgcttcactaggaagatggcagatgacagaataaagatgccacccttattcccataacttttcttgagttagtgtttaacactggtcttcaactatcttcactagagaaggcatgggagcaaggtgtttgtggtgaatgactgtgtaaaagacaagacagaaacgagaaaaatgataactaaaataatgttaaatgaaaaccacacttcaacatgaatatagtatctagttttgtgaatatacaaaactgagatttatacaaaacatgaaaactcattatcctatagaagaaaatgttccagttttgtgaataaagttatttaaatagagtgtcttgacatttttatgtttagctctcctcctagctcccttatgtatgagatgttagagacaatatttgccatactctgttcttcattccactctggaggtgaactctagtgggctaaagttaaacttgttcactgttactatttttttctcaaatgtttcaaattttttatcgtgctttgcttaaattttcagtagttgagatatgcataaatttgaaaccatagtcatgattactcagtgtcgtatttgtttaaatttatgttattgcttgttattattattgttgtttgaaaaataatttcattattgaatcctggtttgcctggaaagtggtgcatagctgaggccagtctcaaacttatactctctgcctctgcctctgcctctgcctctgcagcccttgaatcataaacatccactaccatgtccctgttaaatgtctatgattaattttgtattttactacatagtactatttactgtcatgggagtaatgtagttataaaactaaaatctgttataatttggtaattatataattaaaatggtttcacttttcttgggttgaaatcttttactactaagcagtgagcctccaggttttatgataatttcttggatggtccttagctatattaatggaggattttggtgtctttaaattactctttcagcatcaaatttttctaatatttttgaaatccattaaatagtattttgtcagcaatcccaaggtattcttttttttctaaaccactttaaaaattgtctcattttgtgcttttgttttgttttgatctgttttatttttatttttttttgacaaggtctcacactatgtaacattgctcggcttagaactgactatgtcgaccacgatggcctcaaatttagagatttttaacaatccctgccttctaaatgctatatacttttatatttttattttaaaagagttattatttttctaccttatagacctttataaggcatactataaaatcaatgtgcatatataatgggtagtagtctagtccaagtaacaagcacttccacatcttcaaaaatcactaattgtatgtgttagaatttcatattatgggatgagacttatggtgtgttttgatgtcctttattaaacttcttcatgtttcccctgtcgctgcctcttcctcatctttattgaccactcttccatttcattctgcaaagtttatttttgtaaacaactgaaacatgatgtatttgtgtccctttatctgccatgttttactgaaaatatttatctccagtttcgttcaaactcattcaaactccaaatggcagaaattcattgctgtgaatggctaatgaatacttgatgtatgttttgtaggggagtgagcagttatatactaatctcagtatgtatgtggaaatcacagaacaaatttgagaagttgtttctttataaaagttccggggatctaatctcaggctataaggcttgcacagcagatacttctccctgacctcttaatgtctactttccatgcaactgttgttttgtttgttttgttttgtttgttttcattttgtaatagggtctcacaatcaagaatgggcgtgtgttcctaacccttctctctgtacttccccaatagtggactttcatacatgtaccatgctacctgggttctcattttctttataactcatccaataaaagatatttagctttattctgtgtttcagatattgtgattcataatacaacaaatatgcaagtgtaattgttttctgtgtatagctgtttcatctccattggttatataactagtttttgaaaggagtggaacacactggttgttctttttgtgtttaaaggatttctataatattttctatcatgtgttcacactaaattatatttcttccaacagtgggttacatttcctgtttctctgaattctttttagaatttatttcttctctgtttaataataaacattgatgtgcatataacattatatatcactatagcttttatttaaatatttatataattttatgcaacttactctgaagatttgaaaaactgaaccatttttaagaatgtatgtttagtaatttttaatttttctttattcctaaccatttaatccaggtttaaagtaaaaaatcaaatcactttgtaacttacaccaactccccaatttcttccctcaacacattccccccatccaatctcaaatcttcttttgagtatgtatgtgtaagataatccactacacctttggtacaaggagtcaggatctgacagacagttaacaagggaaaggttcaggtacctaaaaggaagagaagagaagccacaagccaacactcccaagttcttgcacagaggcatatctccagacaactattcatcacaactacacttgacccaactcagctatcattattaataacaaagatcattttaaaggtttttctagtaaggcaattgttttccaatattccttgtaacataaacagctactatgatgctctctttctgtgaacatacctatgtgcagtatttccacatagctcattcattcccataatcatgtctttttaaaaaatttctgaatacatgtacaatatatgcgaactttttcttctagtataaccaacaacttgaaagatggagaatgaatataagagacttgttctgctggaaggacttgaatgtatcaataagcatcaattcaatttatttaagtcattgatggtcaaagatttaaatctggaagaagacaaccaagagaaatataccacgtttcagattgctaacatgatggtaaagaaatttccagctgatgctggattggacaaactgatcaacttttgtgaacgtgtaccaactcttaaaaaacgtgctgaaattcttaaaaaagagagatcagaaggtaacatggaacaaacaacccctttcccacccgtgtcttactgtctctactcccttcataaccttgaagtccacacatagctgtcatatctccggtttacacctcaaagaccatggccatattggtcatttggattggctgctgaggacgttcatcttccagtggttacttataatttatggagtatatttgatgcatgcattaaagacaaaaatagaagttgatcaaagattggggttccagatgtaacatagatgttcaaaagtaataaattccaaatacaaaattatgttatatttaaatatatatattaaaaaatcatctcaccagttctattaagaatactaatctatttatcctctttattaacaaaaataaggatatattttgattagacattgccctaagaaggcacgaggcagcactgcctttcataaaattattgagttgggtaaaaaattttagaaagatttaatcacattttataagtttatgtcagatttccttttacttgtatctattatttgagtgtattatgcacaaaacatatcaatgtgataaaattttgtattttaagagaatgtaggagaatgggaatgaggatagcttggctgaggtacatgggaatcacaaacatgaaggattttctcattttctatgggacaggtaaggaaaactgactaatgggagatggtatcaaagcttgtgcctttggtgctatgtcgctagagtaagctatggacttagcatcgatataaatgcagcagagaggaaatgctagaaatactgatggtccctagaccatctattttgctaaatgctggctttcttttttatgcatttgttgtgataaaaataatctccctatcctagtaacaggagaaacatcactggaaataaataggcaagaagcaggtcctgcaacacctacatcaactacaagccacatgttagcatctgaaagaggcgagacttccgcaacccaggaagagacttccacagcccaggtgaggacttccacagctcaggcggggacttccacagctcaggcggggacttctacagcccaggtgagcctgaggaacagtggtggcctggcagtgcagacaggcagaggtgatttcttccccccacccctgctcagtctataatgtacttattgccttatcagtttctctgcaagcttttattgaagctcagaggataactgatcaagtagcattaatatgtgttcactcctactagaaatctcatgaacccgaaaagcaggtagagcaatggttgttgcatatttacacaaacatagttttctaattcaaattcaattatgttctacaatagaagtaataatagaaaaatcattcatatagcttttcttctccatttgcttgacaaaaccacttatacacacatttttatgactattaatgataatattttagacctgaccagagggtgggtgctactccttcaagttcccaacatattcaggcataataaatctactacctaataatgaatatgcactctgctcaactgattagactcattaacagggcaatggctatactttcagaaaaggaaaggtatgagtgaagaaaagactgacgtgaagaagatcaaggcatctgggaaagcagatcagcctccctgttgtgaaggacccacagccacatgccagtcaccaatatcccaggtctcatcttcggcttcatctaacattccttcggctaaggtacaagctttctgttccctttcatttcttcaatccaaataccaggaacaggtcttgaaattttgaccatgtcccccacttctccctgagatttaattatcaaacatacacagaggctggatgtgatatagatcatcataaaaaacagaaacagaaacaaaaaatatgtaatacagatatagaatttgctgactcataacctttcatttagatggaattcttaatgaacttgttacctctgtcaatgaggagtttgtctgtttgttttgatcccaggtaagaagaggaaagcaaagagtcagaagcaatggactccatttctactctcttgtactcccacatatatttcttttatatgactaacctgttaacttttttataatacatattagggtactcacttcttcaaaacacttaacacattgtacagcgattccatcttaaagggatataagtgtcgtaaaccaatcctctgaattcaaatgttggtaccttgctctagccttaataaatccctccagaactcctatccatgctgggttggaaatcgataatgcttaactaaataatatgctcttgtattattaccagttatgacacagaaccgatgtttgttttccactttgctgtgtatttcttaagaccatgattttcctatttttcctatagatacatataacctgatatttctttgaatgccagaaatatgaaaggaccatcatatctaaggagggtagatgaaggttgtcttgtccagttaaggctctgagaggcttagagatcacaaaacaagtaatacagctgaaatcagaggaactaagaacttttgattgagattaaggcccatctcaagagatggaacctataccagacactgctaaaggcgtcaggaatctgagactaaataggtcatgtgcctaggagaaaacctacaactattattctactaaaggaacatagcaataaaatgaatcctaatgacatgttgccatacctatagagccgtacctcactcacctctcatcaaagatgcttcttgccataggtggcaattgacacagagacccacaactaccttatgtgcatactgtgagagattttagaacagtcattcttcaatggtatacctttatcaaatctgtctcctcaagacccagggatctacatgaaagggaaggatgattccaagggaatagttattctttgtatattttcatatttcttataattgtgtagaataagctctagtataacatgttacaatagttactagtctcttacttgtttttccaattttacatatcaggactgtctttccaagtccctaaactataatgaatataaaattcaaggactacatcattatttgtgtttctctattgattgattaaccactacctcaaactcaatttctccttcagtgaatattcttgaaatgtgtgccttaatgcccattttgtagttttcatgatagcccactaatttattctatacatatcatataaattt

SEQ ID NO: 66 - DNA, 1078 bp, Mus musculus
tgtgtctggtggccagtgtatatatgactgctacaaaaatcaaaaggttaggactttcttatttagtgagattcaacagaaaagaatgtgagcctgactaagctgtgatttttttttcccatagtgaccacagtgtttaagggaagctaagaggtttcccaggccagggaaattgaaagctatgaacaaaactgggaggaggcctggctatttcagcactcctcacccgagggagacagcacagtgagagacacccagtgctgctcaagaagtgaaacaactctgagagtatcctaaccactggtgtcttcctttataccccatttttcactttctcagttactgaattatctgcctacctactcaaaccaagcaggccacttctgttgttgaagatctcagcacctgtacattgctgccgaaattccagggagtataaccaacaacttgaaagatggagaatgaatataagagacttgttctgctggaaggacttgaatgtatcaataagcatcaattcaatttatttaagtcattgatggtcaaagatttaaatctggaagaagacaaccaagagaaatataccacgtttcagattgctaacatgatggtaaagaaatttccagctgatgctggattggacaaactgatcaacttttgtgaacgtgtaccaactcttaaaaaacgtgctgaaattcttaaaaaagagagatcagaagtaacaggagaaacatcactggaaataaataggcaagaagcaggtcctgcaacacctacatcaactacaagccacatgttagcatctgaaagaggcgagacttccgcaacccaggaagagacttccacagcccaggtgaggacttccacagctcaggcggggacttccacagctcaggcggggacttctacagcccagaaaaggaaaggtatgagtgaagaaaagactgacgtgaagaagatcaaggcatctgggaaagcagatcagcctccctgttgtgaaggacccacagccacatgccagtcaccaatatcccaggtctcatcttcggcttcatctaacattccttcggctaaggta

SEQ ID NO: 67 - protein, 207 aa, Mus musculus
KMENEYKRLVLLEGLECINKHQFNLFKSLMVKDLNLEEDNQEKYTTFQIANMMVKKFPADAGLDKLINFCERVPTLKKRAEILKKERSEVTGETSLEINRQEAGPATPTSTTSHMLASGETSATQEETSTAQVRTSTAQAGTSTAQAGTSTAQKRKGMSEEKTDVKKIKASGKADQPPCCEGPTATCQSPISQVSSSASSNIPSAKV

SEQ ID NO: 68 - DNA, 20964 bp, Mus musculus
  misc_feature (1)...(20964): n = A, C, G or T/U
cagaggcagagagagacagagatgggagaccgaaagacagagagataaagacagagagataggagagagaagacagagagagtgctactttactgtttgttttaaaatgcagtgctctgaggtgcaaggggtctaagcttagacattagcctaacaggaaggtccttgagggaaggttgacaaccactcaagctatccatcctgtcgtcttcctttctttttctcctgccgagcagatctgttttggtcttgttgctagctgggaatacagaacacaactgtgaggcttagctttgggtgcattcaatattagggtcttgaaccagcaaacaagctcagactcagatctgagacctcagtggctttgtctttgcccaagatgttcctatcttccctggagtgggaagagagatgctgggctgagtggtgcaggaagtcctcatgctcctggcttcagctcatgttatcacactgccctgaaggagtgagatacgatatttcaaccatcctgtggacttggaacatccatgcagcctctggagtgggcttagctactaaaatgtcaatttctagtcatcaagacgattgctcaaaattctcaatttagtaacagccaacttaattgctaaattttatatccatctggtaatttattatacaagaggcatgcctccacctgcccccaaatgctaccattctccccgtaccccaaagacaaacaaccacaagaatttttttaaaaaatattgaaaggcttgatttatagaagaaaaaagttatggattaaaaaaaatcacacgaatacggaacagatctgctgaaaacgtgagtggcgtctctacctaagtcaggttcaggacgggaagagtcattaaaggggccgtttttatacagctgagtttgggatttaactgtgttctctcgttttcaaaaataatttgctttgtgtatgttaggacaaaagatttctgtgtttggctgagcaggggtcactcatgcgtacaggcagctgccctggacccatgaacgagccttggtgagagagagagagagagagagagagagagagagagagagagagaccataggaataaataaatacctgcccatttcctttaaaaacagtctcacttgagattaaagagagaaggcaagcactccccacacccatcgctatctgtcccacaccacagcatctttttgtgagatgtagacaggcctctctagcccacagtagcctcaaaggcagctggcagtgagaattcttaatggagtcacgggtctgaaaactggcttttctccttacttctgtcacgaaacttaccatctttataaaaactcagtatttacaaggtatctccccacctccaccccctaccccacctctgctctgaagaaaggagacaggaaagtcacacaggaagaaaggcagaagaaaaaaaaaagtactgttgggaaatcaccttggaaacagttactagaggcaattaagcacttgcctaagttttagagatgttgggatcggtttttaagtttctctgcactcagaaacacccagcacgagcctgtcacaagcctgtcatggtaactaataggaaagacagcattcttaaggaagttgtgcactgtggtccatgcctgtcatctgagtatcttgggagacctaggccagcctgggctacatagtgaagcttctcaaagtccccaaacccaaacaaaactaaacctcccagaacacatagaaaacatactgacatataccctcctatacattgtgggaacctaagctctgcacagacctcctctgggcttttgtttatgcttgttctggaggggaaagataaaaggatattgcgcttcctgaataaggtgagatgtcggacatatcttgaagatctccacactcagactttatgagtgacaaagagagtccttctgcggtgctgggtgggtgtgctggtgaacaggggtggtggctcagatggtgtgatgacatcttggtcctcagacttgttgtgtcccgagtcaagtctaaggactcaggagaggctctgtccttccccgagaaggagccggagggagcacctagtggactctgaaatggataagccatcaagggcaggggaaagggatggcggaagctaggggtggtgaagcctgcagtggcggagaggggtgactggtgcaggggctggtggtggccgccagtggccgggccagaggcagattgctcggatgagttttttcggaccaccaggggaagggcttccgtctggtctgtggaactaggcatctgcacactgccaaaggtgtccaaggggttcggaatgatgacatcaccaaagcattgcaggcgctggttggccgtgtggaaattgtggttttccccgttgactgcgaatctggcctgggggatctggagaggtgggaagacctgaggaacctggcgagagggtttggctgagaagactttgaccaccgtgtccacaacctgcgacatggccgtgttcagctcctgttttaaggtctctgccagatgcttgccttctggctgcaaggagtttggcccgtggtctctttctttgttgctgccttctcgcttaggcttgttctcagccatctcctgctccctgattagggctcgggccctgtcgatgaactgccctgggtccagctcacacatctcattgtctgagcgccccaccgagtcctgggcccgtgcatccaggatctccgagcgcatgctgtcttcagacaggtcgccatcttcatcattttcggagtctgtgctgtcatagacctggtagaacttctcctgcagctggcgcagctgcttctgcatgtcttccagctgctgtttcagctgtcggcgctcctctcgcttctgttcttttcgggctgaaaccagctgctggaaactctgttgctgctgctggggcagcttctgcttgcgtttgttttctctgtaactttctcggggactcacagactgcggggccatctctctttcgttttcattgccccttaatgccacactgggggaatggctcataccccgaatgatattctcaacccgggcgcgctttgctctcaggtgctcatcacataagcgatccacatcaaactggctcatagtaggcctgccaaaaggggaaagacactctggggggctgtctcttgaagagttgctacatatatcctcctgatgtacttcggagcctgtgctagagagtccgctggcttggaaactgggctcggtgccaccgtttttgttcatgttatttttcaacagctgggaaattatagttgctcctggaaaaggcatcatggcatcttcatacgagttcgccctcttcagcagcttgcggagtacgttcgacttttccccatctgcgtgttgcaccacagaatattcaacatcctgctctgaaccttggggattcatggcactgaaaaatgttgcccttgccttagcaaaaaatgcagatgctgtccctaccgtccttttcactccaatgtcaacccttctcctcttggtttgccggcttaagagggctgtgctgtcatggtcaggcatcactggacagttattgtgccatcttcaaaagctcgtcagctgggcacagctcaagaatcccgggaccctggccaacagaacaaaagggctgatgaatcattttctttaaatttctccaaatttcctgacctcaatcctgaatcaaatgcaaaatgcataggctctgggatttatggcacatcacaattattgcaatttatcatgaactctgcttgaaatgaaacatttttaaatatttctgctccactggtttaagatggattaagattaaaaaaaaaaaaaagcaaaaactgcttaagcaccagtaatatgattctctttcacaaatgcctaaaatgatactgtttatcttcagaagaaatggcagattataagaacatagcctctgatgagcaattgattaaatttgggggcgttgagactcttattataaaagaagaggggagtgggttactcttaagaaacagggtgaaattttgaggctgggtgaaatttggatgaaaatctgatgtggaaaccactgtggcttttctgttgctgaaggaagggaaggctgaaatagacatagctatttcattacagaatttaaaagcaactttgacacatgtaacctgggaagaatgtagcaaccaacatcttcagcataagtggtatgctaagtactgagatggaggcacagacatgcactgtccaatactgcttatttagtagttatgggttttgatcagtgaattcacaggtggagatggtatctatggctgagtgtacatctaacacagagatgtgcagaaagggtcacattatccatttggtgacttcaattgttagaaagggagatggactgttgccatgtttttatgagtcacagtacttaacccacagtatgtgcaacagtccattattgaaccaggcaagaacacacatatatacaatactagttttgttctggtaaatctgtcaaaacaggacttcaaatggctaagaaactcttcatcacacaccattcctggttcttattgcctatgccaagttaaggggtagggggcactaaacagaagaagcaactggagaaagatagaaaagaaacaaaatatcaatcaaatatatgagaaaggtaggtagcttctttgtatgcaaactagcattgtctgggggcgggggaaccacaagatataaaaaggaaacacccttgcctacattttatcaaaggcccttgatacattgtgtcacttagtaactagcaatgctaaccccaaattttatatgcatgcaagagacagcacatctttttgtttacaattaacgttttatgaagaaaatgaaaatactgccttcatgccgggtttatctgatattgaacttcgcgtttgcttaacagagcacagcttcacaataacagggtccattgccaaaggcagcgtgtggagtgctggattctctccatctctttcggttcacctgtaaaaacatctccatgctccctaggagtgcatctgtggatagttctaaagaatgactacccatgcaaataggcataatttcagcatgaaataacctgcaaaaatcaagaaaatatcccatgcttacatggcaataatatgttggtgttttttggttttgtttcttgatttttgttgttgttttttttttcatgataaatatttcaccatgctgtgtttgctcttggcgggtttttcgtttgtttgtttgttattttctgatgacaaaatgttttttaaaagagccaattttggcatatcttgaaggcaagatgttatttctttctagagatctttatatgtctgagggcgaaacagttcacgacaaaatatcctgaacttgggttggagtgagcgatctcagtgtctttaagttcaatattaagttcagaacaaccgagactcctctcccactaataatacaactggtttggaggtgacaaaatacagcaacacatatgtttctggcagcacattgggtctgataggtaatgcaggagcagctgtcaggtcagggtaaggacgggagcaaggggacaatttcccaggaagattcttttgtgcatacagcagctttcgaaaccaggacttcttgccatcatttcaacatctttacgtcatttgtatgcatgtgtaaatctatttttcccccttcaatatcccctgtaaagcacacagacctccagtgaaggctggaagaaactcctttctgtatcttgccctgttcaccttgccacacagatggttcctctctcctgcccgtcttggactctggagaacacctctggagcagaggctcccagaggatgtgccagtgtgttcatgagcacaaggtcatcccaggcatccttcctcccccagctgccattcaccttcacatccattgcacttcctctcatgttgcctaggtatcaacagctgcacccctgccttaaaccagagccaaaaggagacaccaggttcttcctaaggtaggatgatcccactctttatcttcactggagaataaataataattaagcatacaggctggatccattgagaaccaatagctgtagttccctccaaattcacccaactaaattgattttttaaaaaattttaatcagatatcatttaaaaattaaatagtgatttagttctattttgggcaagaagactaccaatacttgaggtcttcctgtaaaatatccatctgagatagatataaacaacaaatataaagaacaaaataagtgggaaaaattattttatccagcaagacagggcattattttgatagatatacattaatttatttctccaaatcactttatgatttaaacttagaaataaaaggagagtgaccaggcacatcagggccataatctagggaaattataggcaagattaaataataatagctggctgacctagtatcatatcgtatttcattaaacagaatatataaaaatgttttttccccccacattaaatgtgctcttaagtggccatggtaaaaggaagacaggcgagcacattttccaggggttcccataatttccaacccatagtttccaggatgctacataaggacttagtcacccacagtgtcaacccactaagccacccaacaacgcaacatctcttagcatgtgaactaagctgtggtttgtcaactccaattactatggattcttataatgtttttcactttaacattgatctggggtttaagcaggcaatagaaagccattgggccagtcttgctgagaaacattataaagaagatggaaaaatagtgataatagactctggaccaaaggatcactgcccaaatacatgtgtcttataaagccctcctgaattcaggtggaaattatgttaaaatgctaaattattgagcatgtgttgcacggattggtccgcagcctacacacacgctctgaaacctttgtacaatagacagcatgaagcagcagatgccactgctggggagggggagcaggagagcaactcaagacgtgagcacttcagatttaactgctccaaaagagtcctcctgaaacccacaccctgtctcacaaagaagatccatgcagagggtacttttgacttcatgtttttgttaaataacaaaaacaaaaagaaaaaaacaaaaagccaaacaaaacagtttttcagtaaagaatttttcaaagaaacacagcaatacgaagtaaagtggtgcagggctcaactttaataaagaacttattttggggagggggtgtgtaacttttactacatctatctggagcccagattctagacaaagaagtgtttcattatggtaattatccagatagttcagagaaatcttttatgaggcatggggagtgtaaggctggcatgacttcctaccagagttactcagctatctgtccaggttgataaaattatttgaagaaataacttgattttatttctttttaaggggggagggttctaatgatttaagctagtcatgtagttttgagtgacagcatcaacaatagtttaagtcattttgaaaaccagcctgaattcaacagggggaaatcagaagctttgatttgtacatgtgcacacacacacacacacacacacacacatgcagacacacctgcacacacacacacacatacatgcagacacacctgcacacacacacacacacacacacacacacacatgcagacatacagagtcactagctgtcccttccttgcgtttctgctaagtagcaacttctgacttagagatatttctgcatgttacaaggtgaagaaagcctctgacatttttgaagaacctacttggcacaagttaatactttaacaagttgtgatcttattggcaaaaaattaaatttccttttacaagaagaggtttttaaaccataaccatttcacttggtcgtcctcatcttatctaaaattccattcatttttaacttgaaaaatgaacagagaatattttttgagatctgcccaacatattgatttccactcatttcaaagttgtaattcatcaaattgggcaaataaaagagtgtgagaaataatcttaaaaaaacacactcacactttttttcttttggcaggaagaccaaaatgatcagaattgtcttttgaagcttggggtgaactaggcaatcatactgaagaaattctttgtatgtatttatacaaacactgcattttaaatatataacaacacatcaccatgcgtactgttttcatagtataacattgacaacatttgataatttcctttaaaattctaagtagcaaaacttatattgatagcactgatagtatgtagcctaaaccatacttgaaatgatacaagcgatctgtggagagagatgttaagagttgagtaaataagaagggtctggtaacttacaaagtgagtcagttttaggcttggaggttgcacaacctgcttgcaaaggaaccaagctagccatgaacacatggaaaacaatgatacatgctgcatatgcaaggttttgtcctcacaaggtaatgactaaaatgagtagatttctccagaacaggcacataaaatatcagtaagtgccaagcatggctaatgcctattaaaaataaggtatatgaagatagtcataggtaacattttaattattaaaatcttcaaaagcatacaaagaaagttatagaagggggtgactaatgtttaagttaaaagactaagtgacatgtatctttcattttcatggaaacaaagacaaataaccccaaataacaaaactaaccaacaggaatgtttatcatctggcctattcccatacaactcaaacaggagacacggcctcagaaggttaagttttaagaacctagacagacttacatagaaatcccaacatctctcctgcacaaaagcagactttcttctttctcactgcaagcagcctgtttcattctgaaaacactcagaagttcttgcaagaaactcttcatagaactggctgcccagatcttccatcaaatagcaaaagcccagctccctctcacagacttagattctccctctccatcaaagtcctatctaggacacctggcacatgtctgatacaatggcaggcacggttcactttatgagagtatttaacacagggtttgaaagagtttaggcacacacttattcttttggggcagggagagaaaaaaaacactacaaagacaagctttaatagccttcacagttgtgaactggctttggtattttaggcagttacaaactactcattgctgtgcaacacacacacacacacacacacacacacacacacacacacacacacacacacacacacacacacgagattccccccaaccccccttctaagcaccgacttgccagagaggcataaactggagggaagcaaagagaaagtcaactccttccacctgctgccctgaagtgggggttgggggtggggttgcttttggcaggctggcagacagaagcctgagatatgacctcagcagtcacctgccaacatccttaagacaaatacacaaatacaaactacccccccccaaaaaaaaccctctcacggcaggggctcagacacaacagccaagagcctgattcccattagcctgacaatcccgttaaggagaaccaccataaattcacaaaccccttcgtcccagaagcctggagtctggagctgtacagaaagacagaccccaggaaacttgcacctgtctttcttgacacaacacacctgtccagccctgtccatgtgcgttctgttaacagacttttgcctgactggtttaggagaggaaatgattttttttttttttttttaacagaggggcatgggaagggggtggtaaaaaagcaggcagaactcggaaagggagaacaagagggagactctgagagaggaggccaccctgggcttgttctgttttcattagcttaaggagacaacacagatcttctaggaaaaatagaagcaagcaggtgcggttccagccttccccgaggcagagaagggctctgggctgccaagaacagcgtttcgcgctccaaccagcaaccttgggctacttaagactgtctctcagcccctccttcggcttctgctctgagccgccaggaagactcaacttcccaagaagctaggcaggggtgggagagtctgagtgtggctcgctgctctcccccggcccccatcgctctctgcataggcgctcagtttagcaggactaaccggctggcgcagcaaaggcaacgacaacttgctcagctggactttgggtgaggtctaccgcccccctccccgtctcttccccttgtctgttcaggcaagatagcagctctcccccttcctcccgccctcctcgtccttcttctcagcaacaatcactctcacctctccactctgctgggctcttctcctccctccccagtcctaggaactggggcagcagagtagcggcactcagcgaggccagggcgcagctgcccaccacccaagcgtgccagtaatggctgggagcttcttctcgtctatgggcggcccaagcacaacccgaccccgggccggccctcttcggtgcggcgtccaggtcgccccactagcgacccctgaggctctcgggcaaactccccctactcagtgcttcccagcgcggcgcaagcagactgggtggactggcaccgcgctcgctcctccgtaccggaccgtcccccaactcgtctctcctctgttgcagagctgggtgcaagctcccggcgctgagcacacagaggaaagtcaccgggcgccccctcctccccgccctcttccccacggccggccctctgccccgggttaaaaaaggagaagtgaaaggtatgcaaacagcaagcaaatagggaaagccgggaagaaaggcagctagaataaacaagacaaagggagaaggactcggggacaggccctggagtttcaactcccggagaagaaaaagaagaagctgggaagattgcaagaaaaaaaaaatctagaagaacaacaaccaaaagggactcatccccctcgcggccccctcccctgaaaagagtgcaagaaaaataaagaaataaaaataatacaaaataaaagaaagccagagcctcagcgcatcccagacacagtacacaaaaggtgacaagatcagcgacaagtccagcaacaccagcctccccccatcgccaccatcatcccagtcaccggcaggcgcgagaaagaaataaaagccaagcaggtcacttactcttcgtttactgggaggagcggagctcggagttccactgagcctcctgcttagaaaactgtttttagaggctatttgatcacgattcatgtaaataacaccattttcccccttggaaaaagaatgtttacacgggtgtgagtaacgggaggctcttctctctctttcccattcaagaacgagccagtgcgagcgattctggaaaaggggaggggacagcaaccgggtgaagatacttacgcggtgcgggcagcagcggggcgcagccactctctctctttctctctctctttcttttcactctctctctctctccccctctcttcttctcttgcgggcagagaagaaacccacgcgcgcacgcggtgatgtcttactggtgataattggcccaggggtcggtgagtctgtgcgggagcgagtgatctgggcgagtgctgagaggcgaggggagaaaggagggaggggaggggagaggcgcgcagggcagagccgggagcccggggaaagaaggggagagagagcggagaaggcggcgagggctggagcgcggagcggtggcccgaggagcagcgggcacggcggagaggcttgtgtgcgccgcgcggcttccccggctgcagtggccgtcgctttcccagcgctctctcagctgagggctccgctccacaacaagatttactttaagacacagctgaaggaaacaggaagactgcacgtcacagtcccactgacgtacccggtcccagcacccaatcgcgaggcgccttcggattcaaggggggatagcgaggcaagagaacttgtgaggaaaaaaatatacatatatataaaaggggtgggggtgaggggctggggannnnnnnnnnnnnnnnnnnntgcttggggcgcctggatcgccgcgccccggccgccgcgagccatctgcgggcgttgtgcaccgcggcgcccggctcacacttgctcttccaggacgcaggtcttttttttttttttttttccatttcactgacacagatgatggagttctcccagcggccgggagcactccccagactgggatggaggaaggctcggaaaagtatacaggataaaaaaaagtggatattttaagggtcggggtggcataaagggcggaatgttgtggggggggggcacaactcgttctgctttggaaatgatcatagatagtatcaataggaccagtcaccctagtttccttttaaagaggatgagcaaacacaggtaggcttaggttttaaaaaataaataagtgccagagatttcacactggggccgctaagtctgatattaaaaagctctacccgcactggctgagtcccagtcaatcagacctcagaatttataggaattcgcccccggttacctttaaaagtattatttcaattgtaggcatagtgaccacatatgctataaacatcgtttctggccacccttctccagttcgcacatccctacatggccaaagaaactagttcgatataggattcacatgatttcgaagtctgaatgacaaacttaaaagtttattgggcaagacatctcagactctaatacttaaagccacataaaacacacgttggtttgacatcttgggtgaaaattagcagcaaggtttcttcagataacgtggctcttaaagagggccttggctttccttgacaaatgctgaagagcctccagcctcagcttgaatggtcctctccctgggcacagttaacagcagcgcttactaaagaggcagtgtggacataaacactccataaaccccgagcctcaagagctgagaagcactttaaatgttcatacctaggagattagagacttttacaaaaggtgctgtggggacaagaattttttctgagtccctccaattcaatcagatcaaaggttgaaacgtgttgtgacagggtatttataagatgcgagtacaccagcagacccgccgccatcgtctgccgcgcacactctaggaccttctccgatttatcagaatgggagaggatattaatcccctgtgagtcgaacaacggtgtcagtgtgtatgtctgaagtgtgtgccctgtgggaaacttttggcaggcacggaattcaaatattgaaaaggacagggggagagagagagagagagagagagagagagagagagaggtgggtgtgcaggaaaaaaagctcacctaagcacacctatccgtcttcccacctccttgactgcctgaagactttcccgagctcaagtcgggaaacagcattgcccagcgcttgctcagtacactacccgcacctccaatgatggactcctgtcgtaaatcggggccagggagtgaaattacccactcacgtgcccgttagatgggggtgaaatatgggttggacacctttgaggtaaacggatgtactgaaaagggtggaatttgggattcgagaattttttcgaccctttattttttctcttgaagaatctgtttgcgcttgtaagttagcgtcagttcgacggctaaaagggaggatacagaggaaggaagaaaggaggttggagggggagaaaagaggcaagggtggacggagagattccactctgttgtagtttgttgtagttgcacttagcgttcggacgcacgctttgcacatgacacgattgggatctggcggcgggaaaagtttcctgcgtgccctcaaataagtcatttatcaatctcgcagagggacaaaataggcctgacataaagctggggtaaccaccagacagacaagcaaactccccaccgacagcctgcgcctctgaggctcagctgcagcagttcgcagcccgcagtagggcacaggagctgcgcgtggaaagccgagcgctggccatgctgggcgtgtgagctggggtggcgacctggggttctgaaaggtttagccgagccctgtcttgccccctaactgtccaggccacgcgtgagccaagctcccggcgtgctgtctggccagggcttaagcggagctcccctgggttccaagccgcactagagcagtcgcggtcgtgaggcccagggcccctatctctgccgactcgcggtttgttttctgatagagaaaaagctatcagtcagcctggagaccagaggtgtcctaaataccggctacatctgcgaagtcaggggccaagctccttgcaaaccattcttttgcccatcctggccagcaccatcctagacacttaaagtgagcacaagttctgattcgtcttgggatgagccgcgctcttgcaggttgtactagtggcttatctgaagagtgattaaagtgttgttagcgaaaagcagttgtgcatccgggctgaacacactttgccttgactttttcctcctgtttcttcttaaaaacccttaggggccaggaagggaaagcattgctttataggtcatctgaaaccttacaaacagcaggcaccagtgcctaagagatgttgggggcgggggggggggggtcaagcggatccaatgaagaggcaaaccgagagcgggatgctggagagccttggaggcctcctgcctgcccacccacccaccaccacccacctgaggaggggacgagagggaggtcgctgtagcagcgggagcagaccagcctgctgcacgtcgcctagaggcgggctgacggctggcctcttcctctcctcccctgttcccagcatgacgcctaacccaacctggatttgttctgagtggcgggggagaaagtgaaatgccaccagatcagtggcaagtagcagctgtggcagctctctcttggggacgccactgcacagaagcctcgagtgatgtttgtttaaccaacagctttcaaagtaaacaccagcgagtccctccaaagaagttgggagccatgaggactgtcagaaaaactgatttaaaataataataataataataataataataataataataataacaatgataaagctttctccccaccagaacaaaaagagcacccacacacacacattttaccataaaatggcacaggatcgccacactcgtaaacattcataggaaagacttaacacgcaacaaggtgacctcaaagaaaaacacaaccccacgggaatgaagggttactggtgaccgagggagtgtgtgtcataggacagcttgatgcggggaagtggacagaaacgaacaaagggccaggggagggtattccctgccctagaagaataaggagtaggctggaagctattctccgccagccctggctttgcctcaggcaccgaactttccaatatcaagatattaacagatggtgcggagcgcagggagggctcttacttacataacccagccactgcaccgggctgcgacgcgagatgcactcgccaggccttcggtggggctgctcagactccctgagattgcttgttcaacccctcccaggctttgagggccagggtgcagagagtctgtgatttcggttttgtttctttctttctttctttctttctttctttctttctttctttctttctttctttctttctttctttctttctttctttctttctttttaaacacacacacacacacacacacacacacacacacacacacacacacacagagttatcttatcttcttcagtccacaacagggaaactggaagagcgcttgggtcagagataagcggtgggactcctgcggagacaaacggggtgctcttccccgtacttggaggtgtcacagagtggaatgttccctctctcacacacacaccaacacactcgccgccaccaccagtgggtgtgatcagccagtcttgctgtcagcgaagtacaaaaggcaggctccggccgcaggggcgcaggagtggggtgggtgagggtgctcgtgtcagcagactccacggcacgcggggcacagtgggcaaaatcacgccaagcctctgggcaccgccactctttccagcctggcagggttgtaatgctctacgagagtggccgcgtggccttctgttgtcttcatgcccaaggccacctctctccgcgtcggagccccctcggtgctggctttccaaagcctgcgaggaacactcccgctgtactggaaaaactacgggaagggctggaaggcggggagtgtgttcggcgggcgccaggcgcgagcggggctcccacgcggtgccccctgtcctcactcctgcctggccttctccgttggttcgcagcatccaggtcggggggatagatgctgtggcttgttcgccgccgagcgtgcagggatccgggccacctgcccgctgcctggcctgcccccacccgtgtcctgcggccctcgcctccttccttagcagccataagctgcctttcagctcggttcgccccggttcggcgcacaccggaccgaacagggcagccacctgatcccaggccgcgagtgtcccacgcggcagggagatgtgggccatcgccaggcccgcgctgtccccgccatgtcccctcccccgcctgttgctgcggaggtggcgcgccaaagctggtgcagacactggtgctgagatggggacactttgcagggactagcaagaggttgggccatagcaagggatggcagagtgatcgcccccttgcctagtgctgtttaagggtttggggtgttttcctggctcctttcctttggtctctgagtccagggggagaattcagaggtatttctacattttctgggttttggtgatgggaattaagttacagatccagtttcagtgttgactgagaaccatcacaagagacaaacaggcccaggcctgaataccacagaagggaacccagcaaagttgcattttgtttaaattaaagcacaatcaagctgaaagccagatttctataattttttttctggtaatatttcttttatgaagtatctaagtatctgtttgtcatcattttgagatcaaaaggcaaagtccatatgctacatagtttcccaaaatttaaatatgttttaaatgttttatccaacgtggaggagcaggctgttaggcagccagcatggtggcagggttgggagatggtgatgtggggcaggcagatctgagaacctgctattcatcaaaattacccaagatgcattaaaacaactctgaccccacctgagggtagagatccaagagaggacttaggaatctgagggtcacagcaggccactggctaggagttgcctaccctctgtgatcttgtattgtacctgactatgtctcagttctctttatctgtaaaatgggaacaatatcccaaatcacagacttacatagaagctttgacacagagtagtttaagatgcaattgttacttggctgtattagaacaagaggtaggcagtggtacctggattctttacaaaaatactcagacctggacctccctcttgttcccaagctttgggtgaaattaattaaacatgaatgcactgtgagactagctcatgagtgactggtatctgagtattttatatgccccctccccnnnnnnnnnnnnnnnnnnnnnnnnnnnnnnnnnnnnnnnnnnnnnnnnnnnnnnnnnnnnnnnnnnnnnnnnnnnnnnnnnnnnnnnnnnnnnnnnnnnnnnnnnnnnnnnnnnnnnnnnnnnnnnnnnnnnnnnnnnnnnnnnnnnnnnnnnnnnnnnnnnnnnnnnnnnnnnnnnnnnnnnnnnnnnnnnnnnnnnnnnnnnnnnnnnnnnnnnnnnnnnnnnnnnnnnnnnnnnnnnnnnnnnnnnnnnnnnnnnnnnnnnnnnnnnnnnnnnnnnnnnnnnnnnnnnnnnnnnnnnnnnnnnnnnnnnnnnnnnnnnnnnnnnnnnnnnnnnnnnnnnnnnnnnnnnnnnnnnnnnnnnnnnnnnnnnnnnnnnnnnnnnnnnnnnnnnnnnnnnnnnnnnnnnnnnnnnnnnnnnnnnnnnnnnnnnnnnnnnnnnnnnnnnnnnnnnnnnnnnnnnnnnnnnnnnnnnnnnnnnnnnnnnnnnnnnnnnnnnnnnnnnnnnnnnnnnnnnnnnnnnnnnnnnnnnnnnnnnnnnnnnnnnnnnnnnnnnnnnnnnnnnnnnnnnnnnnnnnnnnnnnnnnnnnnnnnnnnnnnnnnnnnnnnnnnnnnnnnnnnnnnnnnnnnnnnnnnnnnnnnnnnnnnnnnnnnnnnnnnnnnnnnnnnnnnnnnnnnnnnnnnnnnnnnnnnnnnnnnnnnnnnnnnnnnnnnnnnnnnnnnnnnnnnnnnnnnnnnnnnnnnnnnnnnnnnnnnnnnnnnnnnnnnnnnnnnnnnnnnnnnnnnnnnnnnnnnnnnnnnnnnnnnnnnnnnnnnnnnnnnnnnnnnnnnnnnnnnnnnnnnnnnnnnnnnnnnnnnnnnnnnnnnnnnnnnnnnnnnnnnnnnnnnnnnnnnnnnnnnnnnnnnnnnnnnnnnnnnnnnnnnnnnnnnnnnnnnnnnnnnnnnnnnnnnnnnnnnnnnnnnnnnnnnnnnnnnnnnnnnnnnnnnnnnnnnnnnnnnnnnnnnnnnnnnnnnnnnnnnnnnnnnnnnnnnnnnnnnnnnnnnnnnnnnnnnnnnnnnnnnnnnnnnnnnnnnnnnnnnnnnnnnnnnnnnnnnnnnnnnnnnnnnnnnnnnnnnnnnnnnnnnnnnnnnnnnnnnnnnnnnnnnnnnnnnnnnnnnnnnnnnnnnnnnnnnnnnnnnnnnnnnnnnnnnnnnnnnnnnnnnnnnnnnnnnnnnnnnnnnnnnnnnnnnnnnnnnnnnnnnnnnnnnnnnnnnnnnnnnnnnnnnnnnnnnnnnnnnnnnnnnnnnnnnnnnnnnnnnnnnnnnnnnnnnnnnnnnnnnnnnnnnnnnnnnnnnnnnnnnnnnnnnnnnnnnnnnnnnnnnnnnnnnnnnnnnnnnnnnnnnnnnnnnnnnnnnnnnnnnnnnnnnnnntcccaggttggctgtgaagggacttggaccaacactttgtagccatcacccatagaggactgacatcctgcaccctcccgtgtatgtatatgtgtgtgtgtgtgtgtgtgtgtgtgtgtgtgtgtgtgtgtgtgtgtgtgtgattggaaggagggatgatatggcctcagctcagtcagtgaccccttgggtatgtcatttgtgcttgttgtccccctgcccccagactctgcacatcagcgtcccctttgctcctaaatcagtctccttctgccccacctaagaaccagagttgaccagtcctcccctccaaaccccagaagagcccgttcttctttctctcaaacactggacagctcctcttgtctctccttggggattatgtctggctgtggtcctggaagggtctagtagaagtgaaactccaatcggactcagggaaggggatcattttcttgattccagggcaccactgctgctaagaccctgcaaagcctggcatttggcggccctgtagagagagcagcccatggccaattctggtgctgacccaactcgagcagtgattaagctctgtttgatttggtcagctttctgaagcctcggctaggagctctgttctacaaaatctgggtgagaggccaaagcatgaagacctcattttctcatattccaaagtgacctttgcataaaaacagggaagatgcaatcggcaggaagatgctgagcctccacggcagccaccgccacagcttcagagaacgctctctctgtacccccgactttgtaccccatacttctgtttttccgctgaaaatagtgtgggtgggctggagaggtgggtcagtgattaagaacacttgcttctctcccgaaagaccagcgtttgtcttccagaacccaccttgggtggtttacaaccatttgtaactccagatccaggaagtctggcgcccccttttggcctcttctagccattgccctcacagggacatacctcacacagacacatgcacttattaaaaataaattctaaaaagaaaagcaaaagtcatcgagtatgggaaaagaccatcggttaaatatggccttccaaataaaaggaaaatgtagtgagctaagtcgcacagtgtatttataatacccgttataaatattatgctcctgcttgcagtagcatatgtaatgggatgtaagactcttagcgaggacatgaagtgtgttgcatctgattctaccaacatacagggctatccccatggcatggacgagtccattgattctggaggagttcttacaacttggtcaaggccaaaagacagccaattgcagagcctggattagaacccagtgttttgtgataaatcttttcctggggagagaaaacacacatctgctcgtgcctgttagggatcgcatggcagtccaaagcatggatactgccaaagtccaacgtggtgaaccagtgagtttcatgggggttacacagaggagtatgggatgggggttattagaggagcagaggtgactccaaagcagctgtatccccaaatgaaagcgaggtcttcaagcttttgcctctcatccagagtgtttggaacagcctctccttggcaccccacatgggtgacagttcacagaaactggaaacctggagtgcaccgcacag

SEQ ID NO: 69 - DNA, 506 bp, Mus musculus
ggaggccaccctgggcttgttctgttttcattagcttaaggagacaacacagatcttctaggaaaaatagaagcaagcaggtgcggttccagccttccccgaggcagagaagggctctgggctgccaagaacagcgtttcgcgctccaaccagcaaccttgggctacttaagactgtctctcagcccctccttcggcttctgctctgagccgccaggaagactcaacttcccaagaagctaggcaggggtgggagagtctgagtgtggctcgctgctctcccccggcccccatcgctctctgcataggcgctcagtttagcaggactaaccggctggcgcagcaaaggcaacgacaacttgctcagctggactttggagctgggtgcaagctcccggcgctgagcacacagaggaaagtcaccgggcgccccctcctccccgccctcttccccacggccggccctctgccccgggttaaaaaaggagaagtgaaaggtatgcaaac

SEQ ID NO: 70 - protein, 112 aa, Mus musculus
  VARIANT (1)...(112): Xaa = Any Amino Acid
DCLSAPPSASALSRQEDSTSQEARQGWESLSVARCSPPAPIALCIGAQFSRTNRLAQQRQRQLAQLDFGAGCKLPALSTQRKVTGRPLLPALFPTAGPLPRVKKGEVKGMQX

SEQ ID NO: 71 - DNA, 369941 bp, Mus musculus
  misc_feature (1)...(369941): n = A, C, G or T/U
tctttttaaaaaaaatttacatttcaaatgttatccccttcccagtttctccccttcccagaaaccctctatcacatccaccctccttctgctcctatgagggtgttcctccacccatccacccactcccacctccccactcttgattcccctacaccggggcatctattgagccttcataggaccaaggacctctcctcccattgatgcatgacaaggccatcctctgctacatatgcagctagagccatgtgtactctttggttggtggtttagcccctgggagctctggagggtctgattggttgatattgttgttcttcctatggggttgcaaaccccttcaactccttcagtcctttctctaactcttctactggggaccccacactccgtccaatgattagctgcaaaatttgggattctttagtgtactcaatcccaaactgaccaaaagatgtggaaacttagtttattcttttgtttattttgaggcaagttctcacatgtagtccaggctagcctggaactcactgttatagcccaggctggccgcctgctcagactatgagacatcagggaagatgtgctttgtttttatttatttatttatttatttatttatttatttatttatttaatcgtgtgcttttttttccccttaagcataaagtttactcaggtcagcttgtgttatagtaagcagtacttgagacgcctcatgggccacttttatttcttcatgttgttacttgcctgtgaggatggtagactagacagtttatgtcacctgatgacccaaggagctatgatcagtcctctctgggcctcgagtaacttccatgttagcaaggcctagatctgacactcagattctgttaatgccataagctgccttcccagcgttgccacaaacccttgattcaatcctgccaggtttctgcaggctcaggtctccctttctgcttctgtagtaacccctgtgcccctctcctaacagcttcttctcagctttactgttttctttactggaaatctgactcatgctggacagaggctgcatcctatgctgcccccattgccctgtgatgtaaatctaccagtgatcctgtgggggcgctaggattgccctgaaaaacaccagggtcactgagatggatcttgctggccacacagacatgtaactcaggcttcagctcccagatcccatgatcctatggtggaaggagagagaactgactcctgaaaagtttctgtggacccctacatgtgtgcccaattcatgcacatcctgcatacacatacggatacaaaaataaaaaataaaattgacataacaaagaagaagacagttaaaaccaacagtaactacaatccacatgaaaagaaccagcacaatggtgcatgtcccagggatgaggaggcagagacaggtggatccctggggagtcactggccacccagcctagcccacttggtgatctctaggccaatgagagaccctgtctcaaagaaggtgaatggatcctgtggaattacactggaggttgttctctggcctctatatgcaagcacattcatgcacacacacacacacacacacacacacacacacacacacacacacacatacacacacacacacacacattttctcactcacgcactcttatactttcacacacactcacacatacacactctcacacaaatacacacattctctctcacacacactctcttacacatattctccccccccacacatagactttctctcacacacatacttacacatactttctcatatatataacactctcttatacatacactctctcacacacactttcacacacattctctctcatacacacacattctctctcatacacactctctcacacattctttctcacatacactctctcacacattctctctcacacacactctcatacattctctctcatacacactctctcacacattctttctcacatacactctctcacacatactcttacatacattctctctccccacacactcacagactttctcacacatattcacacatactctcttgtacacataacgctctctcatacatacacacactctcacacactctgtctctcacatgcactctttcacacacactctcacatacacactctctcacattatttctctcacacacactcttacatatattctctcaacacacactttctcacacactcacacctaatactctcatacatatactctctcttacacacacagacacacactctcacagactctcatatacatactctttcacaatcctctctcatcatactctcttacatacattctctttcacatacatacactctcttacacacactctttctcacatacattctctctcatattctcttgctctctcatacactctctcccacacactctctcatacacactccccccccccactcacacatatacactttttcttttttctttttttttcttgagacaggggttctctatatagctctggctgtcctggaactcactttgtagaccaggctggcctcgaactcagaaatccacctgcctttgcctcccgagtgctgggattaaaggcgtgcgctaccatacccggcccacatacactttttctatacacactcacacacactctttcatacacattctctttctcacacataatcatacacactctctcatgaacactcacacacacactctcacacactttctcacacactttctcacacactcacacactttctttctttcttacagacacaccacacacacattctctctcacacatacatacttcagattgatttacatgtactaaagctagctcagtttttcagctgatccagttcactgtggacctgaatgtgatgaaaatgctagcctgacaaggtgtgttatcttcctgccacatgccctctcctgtcttcagcatctacttttctccatctcttgctacactgcaggtcactcagcactgaactgacattattgaagctgcacttacagttttgttacctgacattgaagagtctggtggtttatttcctaacagagtcatataaagtgattagaaattagactggtggggggggggtgctggcgagatggctcagtgagtaagagcactgactgctcttctgaaggtcctgagttcaaatcctagcaaccacatggtggctcacaaccacctgtaatgagatctgacaccctctcctggcatgtctgaagacagctacagtgtacttatgtataataataaataaatctttgggccggagtgagcagagttgactggagcaagtggggccaaccagattgagcagaggccctaaaacaaattcagttcccaacaaccacatgaaggctcacaaccatctttacagctacagtgtgtactcatatacataaaacaaacaaacaaacaaacaaatctttaacaaaagagattagacttgggagatctgcttttaagccttgctgtactgttaattgtctggattgccttaggtacctgcaggcttccctgaccatccccagctgctcctgaaattcacagaagccctttagcctcccagctttttccataactaacttggagtgtgggtttgtagttcagctgttattgtaagtgcatatcccattgatggagccctgaagctctgtagttgcttctgaaatgatcttttcttgcattggccaatcaggtgagccctgttgtgagcctgaacttcctgtctatctcagggtaccttgttgaatgaagtccatccgtccgtcctcttcaactttgcttctttataatcctatctgcacatgtctatttcagatgtctaaagctcagggtctcaggggactgagaaggaagtcagggtctgtgcattcaaacctttgtttctagtgagaagcttcaaagcagagagagaccaaacttcttctgggtgacagaccaggcggggtgtttgttagggacccaggcaatgcatcattggccagtgaatggatgctgagaactacctttctctaagagctgtcccgtctctttttgcttttgcagcacattctatgaagattggtcttttgtgatggatgaagaaaggtccagcatgctccctaccatggcagctggtaagcctggttgaggccaggggtaatgagtcctgagaagcttggtgagccgagggctcctgggagcagatgccatgatgctctgggctttcttactcttgtgttgctttttacactgggccaatttatctagcctctgacactgtacggatgatgcacttggttgaagagtgtggcttgtggcctggcaggtgaactgtaaagaactggggattggctgactgccttacccatggttttcctgcatgtcagctgaattctgtcagctctgttacctcttctcccttactctgtgaagtgagaacactgtgcgctttgcaggaacctttttggggctttaagagagccacagaaaatgaaaggccttgtatgtggtttatcagtgtgaagcaaggccctggatggctgtgactgtggcctgagacatcaccttacctgacattgagcccacatcgagagccatgttaggctcatttagagatgagagagttgggctttggctgtagtttttctttataggctgtagattgccagtttcagtcttggctatagtaactgtcatgacttgtttggcgcacactgagctcttgatgaggtaggtgttggtagggaaagcccccagtactcagaatcctgagagggtcacctttgccacaattgcgcagacaatgaagctagaactcagggagatgacaagctgcttaaccaaggtctcagagctgctaagtggctttctgtgcctcagcccaggcaagcctctctccagaacgcccaccaccagcttctcctaggtgactcttgttggctgtcttcctgactctgttcacatgaacttctatctaccaatacaggttcggatggttttatagatgctgaagatgagttcttgtcctcttgtgtcctttgtagactgtctttttgctgacagcaagtactgcaatgtcccttccccacttttttgacaggtctgaactccatactctttgcaattaacattgacaataaggatttgaatgggcagagcaaatttgctcccactgtctctgacctcttaaaggagtcaacgcagaatgtgacatctttgctgaaggagtccacacagggcatgagcagccttctcagggagatcacagcatcctctgctgtctccattctcatcaagccagagcaggagactgaccctctgcctgtcatatccaagaacgttcatgttggtaagccagaaggggccctggaggtggcacagtagggccactgaaaaggaaatgagagtggtgctgagaggaacccctgatgctgtcacttcccggggagcaaaatctgtgtgtgtttgtttttctcttgtctttcactgtgagcgggacctgacaggaagggtagagaagcccgcccaggctgccaggtgggtcatctcccaccacttctctccgttctttccttagtttttacgatcagtagtgagccgagctctgctagcatcttgttagtcttcttggggttgggcaggggtgatattttaaaacaaaaaggcacgagcagcttattgtttttgtggtatcttggatgccagcacaggatgcttcagagagaatgctttggacttgtctgtattgggaggatgctcgttccgtagtggcctatctgagcagaaggggaaagtagttaaactgagactttaccagatgttgatgacacccttagagcatttgagatgttagtgagttgctattaggagagaccaaaacttaggggttaaataccaatccctgtcattccaaatccattaaggcagtaatcatggccatccctttgagaacaattttaaaaagtgtttatcctaagttctttttactttttatttttgagacaaggtcttatcatatcattggggtggctttgaacttggatctttccaaggcagtaggatcacaacctgacccagcagccctacttttagaattctattttatctctctatttctgtctgtcatctttgtgtatgtgtgtttatttatacagtgtgtgtgtgtgcactcacacgtgcaaaggacagaagtcagtgtgggccatcttcctctttggctgtacactttgttttgttttgagacagtatctctgtctagactggctggctatggagctccagggatctgcctgtgtctcctgtctgcccttccagggctggagttacaggtgtacacgtccatgcccagcttccccgagagctgggtccaactctagtccttctgcatgtgcagccagcactttacttactgagcaccacacacacccctgaagaatattcacagtccattccccagcaggcaccaactgcctctaatccccatctccacagagctggactgttgactggcttggtctgaagcaggtaaacactgacaggagaaccatgtcacgtccatcaggcatcattgtatagtgttcctccctgccttctggctcttacatcatttctgctttgttgtctgtggtgtcccctgagtggtgggggtgggggtggggttggtgtaggttgagcactcgaagttgctcattctcagcactctgatcgattacattaaatgctgctcagtgtaaaagaaagctctctaaacatcactaacctatgggtataaacataaatatttagaggaatatttgacaatttgagctttagcaaaataatggtagtaggtttggtctcccgtgcctctgatctcctcagcatttgctgcttttccagaggacctgagtttaattcctagcacccacatctcacagctgcctaactctaactccaagggataggatgccctcttttaacttctgttggtatatatatgtgtgtacgcacatgcatgcacacacactcctacctttaaaaagagggtttttgttttgttttgtttttaaaaataaaaaaataaaaaatacctagcagtagtggccaacataaaacaaactcagtggtattttttttttaaatcttatattgtcatttgcttatatattatgtttttaaaagttttttttgcctttatgggttacctgtgtgtgcgaatgtgtatgtctctgcatctgtatgtgtttcttcttcttctttggctcttctcttctcttctcttctcttctcttctcttctcttctcttctcttctttttttctcgagacagggtttctctttatagccttggctgtcctggaactcactttgtagaccagctggcctcaaactcagaaatctgcctgcccctgcctcccgagtgctgggattaaaggcgtgagtgcgccaccactgcctggctggctcttcttttcctatttccttttgttttgttctattctgattagttttatcttcttttattattatatgcctatttgctttttgagagaaaaagaaaggatgtgcatttgagtggggtggggggaatctgggatgagctagagacattataaccagggtatcttgtatggggaaaaaatctatttagaaaaaccctaaaacccccacagaatctgatttagttttggtttattcttggtgtgacagtaggctttgctgccccgtgggagtgaggctcggccttcctctgtctcttactgcagctgttcttttgccagatacccgatgtaaaagggagcggagaaggaggaagaaggtgaccaacattgtctcttttgatgatgatgaggaggagcagggtactggggacactttaaaaaagatgcctgggactgcagaaagctcggaggagaactctgaccgatcctccgtcaacatcatggcagcctttgaaggcacctttgggccaaattccaacgggagccagagcagcagctcatggaagattgattctgcgtctttgaatggggagctgggctaccagaagcttgatgtgaagagcattgatgacgacgtggatgagaacgaggaggatgcgtacaggagcccgctaggaagggggcacactggccacgcggagtcgccagacaggtgagttctgcttgagctctccacaagggaggtagaggatgttatgtggcgaggtggctgttttctatggaagcgagtggaatgagtgagttttggggctgatttgattcccagtccccacatcaccggtgagctacagctgtctgcaagactactcccaggggatcagatgttctctttcttctggtctctgtgggtgtcaggcaccatgcatgtgacacacatacacacatgcaggcaaaacatccacacacataaaataaataagtctaaaatgtgacaaggtttggctgtcattcacacacgtgcactggccatctgcctttgctcatctccgatgctctccatgctgtaagcttcagaggaaagacaatttcaaagttgacatttggcaaagaggttgccatgctgggagttgggtccacatacactgcttctcagaacttactatttttcatgctattacataattcagttgttttatataaaggtcacctttgctgaactgtgagatcctcaggttaaattcttgtttctggaatctgggagagtattcaggctgagatcagtgtttgggtggatttactagtgacagggctttcctgttagccaggacctgacaagagcagaggagtctgagggaggcaggaagagcttccttcatgcctgacagtgtgaactgaggtgctgtgttctcctgcccatggacttggactcacagggctctcctacttcccagacgcacagcactaaggttcctggattttagctcacacactggagcctgtaggacactcagcatgcagtctcacggaacaggggcccatggaattcctctcctggtctgcaaaagcctctcttgctaaatggttctgttactgttgagtatttacgctgtttgcttttgttgttgttttggggtagggtctctggatgtagctcaggctggccctagatacatcatcctgcccctagaatgccgtctgtataaggctattttctactcccaaatatttgttcgagtcatttctcagcagcagtgttcatgtccacagactacggatggtttgagcccggagcagggtctgaactctcttgttttaatcatagttctgcgaaacagctagtgctgtgtgtccttcaccacttcacctttgcccatgtggcgcagtccctctgtttttgttggtttgcttgtttgtttgtttgttttgagacggggtatcatatagtgtaggctggcctgggctgagattctggtgtgtatctctatgcctgtcttgttctgaattttctttttcctgatttggggaattgacacatggaattgtggagtgtggtgagtttaactctgcaggtggactggtggggagtctcagttcgagtccagaggcagttcgctggcagaactctgtctttctctggagaggttggtgtttttgtattgcagtctttgttgtttggctgaggtccatctagtccaacagaacaatcttttaactaaaactctactggtgcaaatattaatcttttttaaaaaatatcctcacagcaacttctaacatagtgtttgactaactatctgacacagtttcccaatcaagttggcacaagcaatcattgaaactgccgttagttctgagcacccttggaatgccactgcattctgtggctctgtagatgctgagttgtgtgagtcaatgcctgagccccaggcctctctcttcttacccctggtgccagtggtgtgcagcctggaggaggaggccaccttgtaagcaagggtggttgctggcattgtgatgtgtaagaggcacaaagcagtgttgggtggccttgggagctggacctccatggaccatggacagcctctgtccagtgtacagcggcatcatgattgaagagtctgcagagaagccggggcaggagctgagcagtgatgaatggcttactgagtaatacttggcttttgggtctgcacacagcggtcatgtcggggagtgtggccaggccagggggctcagccaggcttgccattgcttctggcaaaatctgatgtttgcttgtttttaggatagtctggtggcccaaatttgggctttctctgtttgttggtaatttaactatttctttggtgccggatcccgctttatccagtatctatcacaagtgttgactttgctttttgtttttcttcaagataggcaatagctttattatggaaaggagtgtttcattcctcttgtttgagctctgacaccagtaaaaaaatgagtctggagggtgtcggggtaactccgagttacaagcatgagccatgcccatctctagtgacttagctcctcatacctccagaggtgtacagcgagtgccctgagccatagccgcggcctgtccagccatttcctgcaagggccaggctggctctgcaggtcccaattccaggcctgagaagacacctgcacaggcaggcatgaaggctgtgcatgggggtctgccaatagccctgggggcggaagatggttaacaaaatatctgaccctgggtggagaatctaccctgaggacattgtctcaacttgagaagagctgagtagcaagattccaaagtcctgttcagagaagcagaacacctggtctgaccttaatgtgctccaggcatgaacctgccgaggagtttgtccccgtgtgctctgagcatagaatcctaacactgttttgttcttagaactggttttgtgtaattaattaatttttgggggtgggggagaagctcttgagcaatttttgtctgtctgtttttgcagtatttgggactgaactcagttttctgtagcccaggctttcctgggacaggacaggcagttagtagaccaggctagctttgaaattctcagagaacttcctgcctttgagtgctgggaataaaggagtgagccagtctgctcactgtgaacatcgttagtgaggagcgcgcttgtctgagagtctggagatgaccttgtaccgtgatactgaatgggaacacgtcgtcggaagtgcatgtgtgctttcactgcaaccgtgtaagtgaggaggcatggccggcactgtagacctgatgcttgcctgttgctggggtgttctagtggcccccatttgggccttctctgctggtactttaaccattttcctttattcagtgtttaccatgaatactgcctgcctaggaaaccctttcacctagctgtgcttggactttatttttaacattgtctcgattttgaaacaaatattttgttttaatgataaacagtacttcctgttattttaagccaatcttaaatcttttttacattattagtgcatgtgtatgaagatatttgtaaagacagttttcccctttcatcttaggggtcctaggggtcaaactgaggtcatcaggcttgacagcaagcacctttatctgctgagcctttttgttggccctttaaagtcaatccaggtgtcagctgagttggtgacccttgagggccgcttcctcttgggtttggggcctcacccttcatggctctggtttctcttggatctggggtctcacccttcatggcaagaattgtctttgaaacaagaagaaaagtccacgtgcccagagaggtagtgggatgtttggaactaggatttgttgatcccaccaagtgagaataaggccaggtttaaagcaagctttattaaatactggccaggacagtggacattggccaggtccattcctggaattcccatagaatggccatgaattatgttagtctggtgctcacgaaggcgaaacccacaaggctgtgcatttctcaccttcgtcaagttgtgggcaagcatacattctgatgtacttactgcctatgtaactcctcctacagggtctatatgtataagtaactccaatacaggatcaagcatatcctgtatagttgaggcaaccaagcttgtttataaaagtggaaagtcatggcttgtcttcttatgcgaacaacagcccccagcattccaggatgttgtctgtccttgggcaaatgcggcttgaggttttgttttgtagatctcttaagcacagcaatttaaacttaaaatctaacttcagctctcacacactggacagtactgctctctctgaaaacgtgccttgcctgcatgctactttaaactgcatgccactaaataaactgatagcatgaccactccatggtatagttaagaggaaggttatcgttgtagatatgaggaggagaacaggcagaggcatctggaggagttgagaacagagagagaaagaggtagactggacacggccagctctctgtgagtggaggggagggggagtaagggatggagaatagagagaccacagcgagagaagcaggagcaggagagagacagaaccagccaggtcataagaaggatgaggcgcctaggggaggcggcaactaagttgtcagcattgacttgaaatgctgataggcacaatacgtatatattaattagagaaccataggtccctcttgctgaggacaggaagtgagcttttggtagaacaggctttacgagttcttaaggaatgctggctgacttccagaaaaacctcctatagtccaggttgaactgggcctagactcaattttggatatgtcagttggcttgccctttttgggagcaacttggcaaccaaagtctgaagagggtggttcttttttttttgtttgtttgttttgttttgttttgtttttttattatgtattttcctcaattacatttccaatgctatcccaaaagtcccccacaacctcccaagagggtggttctaatagcctagaggcacagccatgtttaccttaaacttggggcggggcagggggaggtcagtggcaggagctgtccctctttcagccctgccctgctgtctaaatgtccttacactggtcatggaaggaagcaaacgattcactcataggattctgttaggactgttccctggatttcttgtcatgagcaagaaggtagatattcatagttagtataacaaaagtcacacattattatgttgggtttggggtggaagccaagaaaactcacttcagagacagaagctcaaaactgaaagctttattttctgtggcacagggaggcagctggtttgcggaatctgaatctcaaccctgcatggagatttacaacaattttagagggcggggacagaaagcgaggtagagcaggatgcattattgcattgactaattatattttgacacaaggagttaaacaaggaacttaaagtaggtgactgggccttatccgggtcacctggtttcagggtccttgagtgagctttgtcagtcaggtcccctcctggactctggtccataattcagagtgatgagggaacaaaggagtgggtaagctgcacacagcccattaagtcaagacaggcagtatgtttactattcgtgcgtgttagtttagagataatgggataacaacaacttccctttgtacatcctttactggttaacacacaaacatgaaacatctgagaagcagggttgaagttggttctgggtcctgggaacatgaactcagttttgaccttgccagcaagatggaacttattcctgaggtggactcagtaaactatctcccagaagtcatgctgagggtcatcacacagggtcacactctaaatttctaattacctgagcctatcttccccatgtatcttagctgaaggccaggtccagtctataaccaaagtctctgatttgagggtcaggatcttgaaggagactttccagccacagggtagatcaaggtggtgtctctccaaatgtgcaaagaagaacattgctcttggcctctgcttatatcctgtgcaatggtgtcatgggcttctaggaccatgtcaggttctcttgagtgagtgatgtcactgggttttggttatcaggtgcagccgtgggtgtagtggattcccgactaagctatatttgcttgtctaaaaggcatttttactatggttttaacacccacccaatgctagctccagctagatttggttggactttaaaggcttgtaaagaaacactgtctataagagtgtgccacacagtctaaaatgtttacagagaaaatgtcttgacctgtgccctaaaataaaggatgttatgtagaggctcatgcaggtgggaggctggacaccattgtggtttgctttggaagatctcagtctgggtgctattgtatatggtcaacaggtgatattgttttgaggtgagagtctcactatgtagtccaggttggccttgaactcatcacagccctcttacctctacctcacaagcattgggattataggtgtgaggcaccatacctgtggtcagggtctttctctctctttgtggggctgcagattaaacctagagctttgtatttgtaaacacggcaccactgaaccatgtggctgtggaacagagccttgttgtggtgcctgggctcggcagtctcctgggtgttagaattttaggagtatgcccccagactctgctaaagtacataatttggggccggggagatagatgacttactggttaagagcactggcagctcttctagaagactcaacttcagcttccagcactcacttggcagctcacagctgtgaggaaacagtaaagccactgaacccagctattccatgggtagaaagaaagctttactgggaaattcaagattgccgtggccgtctcattgagcatagcaaaaagacggggaatgcatcaccagttttttaagagaagggttgggagggagcctggaagttatggtagggcgttcctgcgggtcaggacagcctgggaactaggaggggaatttgatatgtgttgcaggtatgtgttaatagggaactagttccacattgcctttagggacagagaaggtcagtagagactcttcctgacaaacagaaacccgtctcacagattctgaggagctctgcttttagggctttgtctatccactagcagcccttgtgtttagtttacctggtcagagtgcagtctgagctgaccccagactgtcattttggggaacccactttagacctaacagcaacagtctttaactccaggtccagggagtctgacactctcaggcctctgtgggtattgtatgcatgtggtgcacagacatgcacacaggcaaaagacccatacacatagctttgtttgtttgcttgcttgtttgtttgtttgtttttcgagacagggtttctctgtatagctctggctgtcctggaactcactctgtagacgaggctggcttagaactcagaaatccacctgcctctgcctccctagtgctgggatcaaaggcatgcactaccactgcccggccacataagatttttaaaaagtttaaattacataatttgattttctccctctccccctttccttacttgatgtagtaaggtgtgatgttgatctgtcgagcttccttatgttctcagtcagtgtgagtgtacaatctgtaagaagatcagaaggtcaaggccatcctgagttctgtacagcattctctaccagcctgggacacttcacaccgcgtctcaaacaaagaagtaaaaaaccaaaaactcctgataaaaccaaaaatctacacccttcattctcaacagaatcaaaccaaagcaagaccccaggttgatggtcagttgagctacacaaagtgtgttagtgcttcccagcctcactctcccaagtgctgggattataggtatactgtagctgtcatttgctagtttgtgggttcttcttccacccttctctacgccatttcttctatcctttcaacctcctcacactagataggagagaaggaaggatagagaggtgtggtggtaattttagcaacattgctttggctttcggcaggtcacatgccacccatccaggagctatctggattcacgaatggaacacacgcgcacacacacacagttaatgcctttggctagctcaaaggctaggcactcctaaaccttcccctgtcaccccaagcccaattggggaagtggccaatggtcaaattctcacatgactggctagctcctatgtcccatccttcttccccaagtcatggtgattttttttgtctcttcttctctctcctgtgtcctagcccacggaaatctaacagttccacctcatctccctttgcccagccattggccactgacatctttattgattgaccaaaaaccagctgaggacaaggatcttcaatgtttggacacacaggtttctgattaaatccaaacattaaaaccaatctccaacacagaggaaaggaatgaaaccccttaataaagtcagggatctgaaaggggccatgttatctagttagactacttcctgctgatcagggccaatgagttccttggggaaagtttggtcttagcaatcaggatatctaattttttcttgttgttgtttcttttctgcgcacaactacctaacaaactttgattaacaacaaccagcaacaacccaccaacaaatgacctcacttttcagggccccagcatttatataacctctgaaaagttcccagaattccagacatcacacagttgcagaaactatctgcagctggcaaaatcacacttctgctagagcacgaggcaaatcatagccatagtcacacacctgggattaaaacaacaacagatttttgtaatatttctgtatttttttaatgaaaccaaaatttcaaaattgtcactacagtgtataccatcatggttggctacaaaccaccctttgtaaaaagggccttcctcctcagcttcctgctctgttccacaatcctgagctgagccttccgccttcttgcagggtgacatgattgatgtctctgtcctcttgcagactataagctccaagagcacatgataaccattttttaaaaaaatttttatttactttatgtatatgactacattgttgctgtcttcagacacactagaagagggcattggatttcattacacatggttgtgagccaccatgtggttgctgggaattgaactcaggaccttctgaagagcagccagtgctctcaaccaccgagccatctctccagcccccagcatgataaccatttgttgttaatttgctcttgtggtgaacacagtacctgctatcaggagacactcagcaggctctcataaacaagtacttgaggggtcctttctgagctctgatgtcctgattttggccccatctaggcctggagacttgtggaacccagatgctgtagtatgtctgcaggccctgtcacgcagctgtattctttctccccaggacactggatgggaacgcctgcctggcccaggtccatggctgggctccactgcaggtgcttcatggagatgcggatgctgacactgatgtactcttccctgtcagtggagtgggctcctatggtgcagcaggtgggtacttcctgtcttctccagcaagagcttctgttccaagaacaagagggggttttgagttatctgaacaggtaggaataggtaggagctaggagatctggggctcagggcaaggatggcttgtggacattcatttaagaagtagcttaaagatttcctctagaactggaatgtacagatgctccggcaggatgccttggtgtactggctggttttgtgtgtcaccttgacacaggctggagttatcacagagaaaggagcttcagttggggaagtgcctccatgagatctagttgtggggcattttctctattagtgatcaagcagggaggacccattgtgggtgggaccatctatgggctgatagtcttgggttctataagagagcaggctgagcaagccaggggaagcaagccggtaaggaacatccctccatggcctctgcatcagctcctgcttcctgacctgcttgagttccagttgtgacttccttcagtgatgaacagcaatgtgaaaatgtaagctgaataaaccctttcctccccaacttgcttcttggtcatgatgtttgtgcaggaatagaaaccctaactaagacacttggggtaaactggttggcaaaacccaaggaggctcacatgcttgcctccaacagttcgttactaaacttggtcacatcaaagttaaccacaactagtgactatgtttttttcaccttaggagatggaagaagtcacttgaactttgtacaggccccacccagcacctgtgcttctctttccatgtgtgcttctctttctgtgtgtgcttctcatttggtgaaggcctcagagatgtgcagctaatctgagagcattcctcagttcacctgcagtctgtggtcttttaacttcatccccttgggtctaacattcttactttctttgtccttacttctgactttattggctgcttgttaagttgaggagtatattatattagcttgctttctcttgctgtgaggaacacaataaccaaaagcaacttataaaagaatgagtttgacttctagttccagagggttaagagaccatcacagtgggaggcatggcagcaggtatgcatgacaatcagagaaggaagctgagagctcccatcatctaccataagcaaggtgcagagagagcaaactggtaatggtgtgtgttcttagagcccacccctagtgatgtccttcctccagtgaggctgcacaccccataacctccctaaacagcatcaacactgaggaccaagtgttaattaaatgcctgcagctatgggtgacgtgtctcatttgaatcagtacaaggaatggcagtcacatactgctgtgatctgatatgctagactttgaagccctctgggaagacatctttactcttgacagtctagattctgtgggagctgacagggactgcatcttgtgcccagccaactgtagggtcacatgacattcacgtgaactcatgggttctttgttcagcatttatctgttctgctgtgtgcatggtgctaggccatggggatctgaagggacatcccacctgaggccttcctccattttcacagtttttaaaaaatttttaattaattttttttcttgagattgggtttcattgtgtagatttagctggtagatcctactatgtagaccaggctaacttcagacttacagagatccacctgcctttgcctcccgaatgctaggattaaggggcatagccttttaaattctttaaaattttgcgtgtctatttgtggctatgtgcatgtgaaggcacatagtgtaggtgcccatggtggccagaagagggtattggatcctggagttaataggcaattgattgtgagcccccggatatgggtgctgtgaactgaatgtaggttctctggaagaacagcaagggctcttcaccactcacccagccatctctttagctccatattccaatcttttacaatgacatttacttgtttatgtattttgagtatgagtatgtagagatgtgtccctgtgcatgtgtggagtcacttctttctttccagcaggtggattctgggggttcacatgggtatcatcaggcttggcagcaaatgcctttatatactgagccatcttgtcagcctagtagtttttattttgagacaatatttcactaaggccattcatgttgcctttcaactagttgtcttccctccccagcctctcaagtgactgggattatggtttatgctaccagccatggcttgggggtctgtttttttaattacccgtgtgaaggagaaatgtatagaatgtgtcttccgaatgcttccatatcctatctattacttcttgccggtgctgttgcaaaatggcttctcaacaagcctgcactggctccttttgtctgtgtttttgtctgttcttcttttatcagccagagcagatatggagaacagtcaaattacatctttctcatgctctggctctccttctgcacctctccctttgctgttgttacattaagcaacctccaagcagtggcagccttactccttctcactcacaacgtccctgccccgtatccacctgcttctgcttctctagctcgcttccccaccttctgtacctgaggtcatccctcaggttgtagcttagatgtcaccttttttttttttttttttttgagacatggccttgctatatatccctggctggcctggaactcataatgtagaccaggctgaccttaacttgtcgcactcctcctgcctctgtcatctgagttatggaactagaacacatagctttcttgactaataacacttttttaaaaaatgcctttttatttttttaactgctaccttcttgtacaagtcaggcttcgtgtcccgcacggtataaccctgaaaagctgccttcattgaactgatggagatattgtgtataactagacagtgcctgtcctttctaatctgtaaggttcacaagtacaagaccatgcctgtcttccagtgtaaccgagtttgacactggtcagttctgagtccatagttggcaccataagtaaactcctatcgagtggatgagcggatgttgcagatggtggagagatgctgcagggcaaggatgcatagtgttgggagagtggtacccacacaggacacggggcagacggaggcaggagagccaggaggtcagaggggtaaacatgtactttagtgagcctgcctgctgaagtgagggggctcagctcagtgctgagtagatgcttcccttaccaactccatgatcctgggaagtcagttaagcccttggggtctgtgtcttcatctgtgaagtgaagataatacagacttggggcagaacccagtggtagagcatttcccagctcctgtgttctatcccatcaccatacatataataaaagatgccagtggctgttcatgttctgtgtgccggtgcatctgccccaccacagtgccggccgtgtgtgtgtatgtctgccagtcacagagaggggccaagtctggaatgacctttattccagtcatgcatggtgttggactcagatgtggctgagtttttcagcactgaggattactgaactgagggagcctcctgaaggatccttagatgcttctaaccagaaatgagcacaggagcagagtgaggggcaatttagtgacatggagattttggatattgtgtttgtcagtttctgttactgtaacaaacaatactgggacaatcaacttatagggagaaaggggttattttgcctcataaactcagagatttcattccatgtttagttgctacattgtcttgggcttgtggtgaggcagagcatcatgtttggaaatgcaagatggaggatactgcttacctcatggtggccaggaaatgcagagagctaggaagggacctgggtcccactatctgattcttcaaggccacgtcctccagtgaaccaggctctgcctcttagagtcctgctgtggcaccatgaactagggattaaacatgggcctttgccaggaagtgtaagcttaactgattcgcctggctctgtggtgggtggagggcaggtgcccctgagctgagagtccagaaataaagcccaggggttctgaaaatgcaggtggctgctgggcccagggaggtctcagtagaacttcctgacgaggcaagatgcagggctggggtttcagctgaatgagggagtttgagagttgtcattttgagaggtaaaagtatacattagactttgtagggttacctagaggcacaggggccaaagagtcattggtggttcacatatgtaatccccggcctcaggaggtggaggcaaggactgttacaaatttgagtccagcccaagctacagagtgaaatcttgtctcaaaaccacaacaatatcaaatttaattatgtcatataattgtgaaaatgttttacataggccagacaagtctgataggcacgtgcttgtgattcccgcagtcagaaggaggaggcaggagaagcttgagttagaggccagccgaatagagcagagcaaagcacagcaaaacgggaagcaaggcacagagaggctgcctggctggactgcaggagaggagcagggccttgcacggtagccagcagcatctgcacccgttagcctcactactaggtagtaaggacaggagagctagtcacctgatttcccagctgatgcctcacagatggaaaccaggctcatggtgccattgggttactggagccagcgggagttggctgggatgtgcagccaacggtgagaagggatttgtcttctccaggctcacatcccttaagcctagcagaggcagaagcagaggcccagagggttgctctgtctctggctcctttgcctgactcaagagtttcatgaatgagcaagggttcccctgagcgatacagtcttcctggacatttagccccaggtctacgggtctgcactcttttcctggaagaaggcctgagcatcagctaatgcacctgcagcaatcaggaacgttctttgcctattctagagattcatggcctcacttcctttcccaaatgcttagtgacttttggcttagtacagtgtcagacttcgccaatcgtgaggtgctgctgccctctagtgtccactacaagcaggcgcaattcatttatcaaaaaccccgattctgctgtgggccctagattatggactttggaaataacttcccttgcttcaaggttttgttttgttttattttaaataaaaaaggcacatgcagcaactagaaacgagtcttaatgatgcctgttcaaaagaaatgggtagtacatgaagcctgtatgtgggtgggaagagtttaaaggtagctaataggccagctgagcacatggtaaggagaaatggagttgaaagtaaagcctcattctctgtgtgacttctgcagatgcccctgtgggaagtctggagaatggaacaggaacagaaaaccatataatcccagagcctggccttcggtacaggtcagtatcaggacaccaagcccatcagtggattgggccatgctgtttacctctctgccttgtattttcatttggagacaggtggtacctgttggagttgaagactgaggcccaatctcacgtttgtgctcagatcgaagaaatagaaaaaaaaaatccagaaaactaagttgccagtgtacctgttgctcgcagggaacattgccctggtctcccaaatatcacctcatctctgttgctcttatttcctcctctctcttcacaattttaatttggtgtcttgaagttagccatctgtgtacttgacttagcttcaaggtaagggggtccttgctgccccacaccttgcttggtgttttgtcacccagaacagataggattctgaaaatgatacaccatgaaggggctgataccactgagccctgcctcataaaggatggtgtccctgcacccttccggaattctgattcctttcttcttgtgtttttgagccttttccaaatgcaacagtgatcaaggaatgcaagccctggccttggggtctcctgctgcgtatggacaagccagtgctattattcacattagaaattgattgtagatatgcatgcagtccagttacctgcccgcattatgctctctgagcctctctgagcaccagcctgcttacagggggatgctggaacctgttgttatggcatttctatattcactgataatgcataacctgcctctctgtgtgtcctcatttaaaggcatcttgtttagaatctacaagagatgtagctcagctgtaggagaatgcttgcatagcatgcatagagctctgggtttgatccccagcaccatataaaacttgggaagcgaagacagaaggatcagaagttcaaaatcatctttggtcactgtactggctagttttgtgtcgacttgacacagctggattatcacagagaaaggagcttcagttgagaaaatgcctccatgagatccaactgtaaggcattttctcaattagtgatcaagggggaaaggccccttgtgggtgggaccatctctgggctggtagtcttggctctataagagagcaggctgagcaagccaggggaagcaagccagtaaagaacatccctccatggcctctgcatcagctcctgcttcctgacctgcttgagttccagccctgacttccttggctatgaacagtggtttggaggtgtaagctgaataaaccctttcctccccaacttgcttcttggtcatgatattttgtccaggaatagaaaccctgactaagacagtcacatagaaaattccagcccaggatccatgagagaccatcagaaacaaacactgttgacttgttgacattggacagtgatatttcatgcttgtctgaatgaagcttacataatatgtggggcccttgtactgggaacatggacctggagactattctaactagggaaagtgacaatacaaaccataagaatgtgacaaagtagactactgaaaggacgtgtgttcacgcgtgtgtacacgagttggaagaggaaggcagtggtttcctgtctgacccagctgcacacatgcccactgagtgactaactcttccctcgtgagtgagcggcttccagagggtgtttggattggttttggagttaccagtaaatttcagacatctgctgagcagcttcattgtttttccagtagattcctggggaaacgttttgcctgagagtgttgtgaacactgaagttgcattttgggatgagtgtaacttccttctgtctacttcctcccagtagggaagccagttctccaggccaaggaagtcctctgagcagcttgctaccttctgcctcagtgcctgagtccatgacagtccgtaagtactctcagaggctggcatgtgtgccagcagggcacctgtgcttatcctgtgcaggtgtgggctttgaagtgagcatgaagttagtgagtgtttgctttctgtgcacctgatcgtggtatcgctgtaagcttccagactatggccggattgtggtgcatgggggtgaatctgctaaaggatgcaaggaaccttctgtgccttgcggtttctaagctaccttctgtgtgcagccagagtaaggctgtcttctgactttccttgtgactctggacaaatcagttttgctgatgacatattctaatgacaggtggtgcaaatcatttccagcttcagagggaagtattagggacacggcaatgaagagtgtgtgtgtgatggcccgcacccacacccacacccacaccagcaattgtttaacaagatagatgttcaatgactaggtcagttgggattggggccggtgccctgactggggttggcagagtgggctagcatgagactccatggtcatcagaggccagggctcttccttttcctgactagctgttgtctttgctttctgagctctggccatttcgttcctacccctaatggcaggaaggagaggggcagagggcaggctttctgtttccatatcacattcagagatcaacacttggatagtgtaaaaattatgccttttttcctcatcagcctttgggtaaaaattaacatttccttcaaacaccaaagtacaacaaaccttgagcccatagtggtgatgtcagatggagagtaactttatccagagaagttccaggcccctttaacatcaccccaggatgccatttctgcttggaaatgcattagttatctgaggtgacatagaaacttccacacggatctcctagatctccaagcctggacctttctgtttacgtgaacactctccagagccatgttccctatgagctgaggtttcccacagtcctctggctgcagagcaggaactgctagtgtgagttctgttgctgtgcagggctgaacagatacttaggtctatgtgaggacgacttgtctgtcaccttctcctagtggccaggcatggttcccagagcccttctcagcctctctccagtgtggggtatggagcaggtgaattggttctctgggggctgccatggatcttgcctctgagcctcccaagccatttccatccctgacaaagccaccagcttggtcagttcctttcccatgaggacattcttgtgatacctctgagctgtgcctgcagcagggactcagcccgttttattttcattcatctcttttttttagaaattaatcctagttgtttctggtcatctttggcttgagacctatcaggaattcccagccaaccttctgaaggaaaggcccacattggtgggccatttgactctgggtgtctggtagttatatgggctgtgcagaacagttgtttgtgaatgggtgggtgggttagcctttgttttcaggggtgatttcatgtgggaaggcttttcttgtccactctgctcctgcaagataaggaccatgcctctttcagaaatgtgggtgcctccacccacccctgctttatctgtgagagggataggaagggctgtctgtgtagccctacaggattagtctgatgtaacagaggattgacactgggaagccttggcaaatgcttcttttcctgtgtgcttgtgagcattgtctctggcctggctgacccttaacagctccacttcttggttgttccagccgggattccctgcaactttcctgatcctcgtgttctcattgtcagcgggatggagccacctgttgagtctgtgtgcctgtggtgacttgtttgctcttggtagttgctgtgatgtcaaagaaagatgtcttcatcccctgctacagtcttgtgtgctcagtgggtagcagtcgttgatataagagaccttgatagggcagtgtggataagcagccttggccttggcctacagcttatataaataatgttcccagtgctgagactggcgcatgcaaggaaacacccaacaactgagctgcagtcccagccaagtctccagctcttcacaccttggttcacataagtgaatgtggtcaccagcctggaaggcagcagaactctgatggtctgggctgagtttgcagggttttgaaatgtcacctttctttgtaaaaggcaagtgccacagtcatatcttcttgttgagtggccagcagtgctgacctcagcacagacagataatgacggccactcagtatgccctgtgaatcctgtgaatgccagtgagtttagagtagtcactgtatgcatgaacacacacacatatacacacactgcacactgaactcatatgtgtgcacacacacagaaagtaaggtctaacaggggatgctcagtatgtggaaagcactctgaatgttggtacctcactagcaggcacttaaggttgtgactggctgtctgcctgtgggaaaagccacccagtactggatgctttcccactacttagtagacatttctttatgtttatgtcagctttacttcattcacctcctgtttaacagccgagtgtctgtacatttgaattaatgtttttgttggaatatgtgatgtgagctgtgtttaagaaagcacctctttccctattgatggctggaagtggcactgcagcaccctcaccaccaggggccactctttccctgttgatggctgtaagtggcactgcagcaccctcaccaccaggggccactctttccctgttgatggctgtaagtggcactgcagcaccctcaccaccaggggccactctttccctgttgatggctggaagtggcactgcagcaccctcaccaccaggggccactctttccctgttgatggctgtaagtggcactgcagcaccctcaccaccaggggccactctttccctgttgatggctgtaagtggcactgcagcaccctcaccaccaggggccactctttccctgttgatggctgtaagtggcactgcagcaccctcaccaccaggggccactctttccctgttgatggctggaagtggcactgcagcaccctcaccaccaggggccactctttccctgttgatggctgtaagtggcactgcagcaccctcaccaccaggggccactctttccctgttgatggctggaagtggcactgcagcaccctcaccaccaggggccactctttccctgttgatggctggaagtggcactgcagcaccctcaccaccaggggccactctggtgaagctcactagcttcaaaccaaggtttgtgttggtgttgggctagcaatggtgcttgctcctctggtgggtttgtgaaggttaaacgcatatatacaagaaacatactcagaagagttgtaccttacaatttgaaaagacagattggaaaaatgtatctcagagttacacgtgttaagtgttcagtaacttgtaggtgagactgttagcacccttaaaggattcatttactgattccaaacacagtgtctaggcctccaaatgggtggacatggtttttgttttatgatggcatccctacaattacaagcctctgaagccccctttcctggatgtgtacccttaatcctctctagacgcttaatcttctcagttggggtgatttcaaccccaaggggatatgtggccgtgccaggagaccctggatctccctgcctggcatgagaatgccttcggcaaagcctgactgtggttataccagggacaacaggctctttgtgcccagtaagtatccttgtggtggacaggggtgctgaatagctgctggaaagcttaagaaaagaacggacctattggaaatgatgagactctagggactgctcatgactcctgtgggtgtttgctgtctcttcagctctgtcaccctcgctgtgaagtgtgaaaggctgagcacctgcagaccagcccagagcgggtggtctgagcacgaggcttcctgacgccatctgtctttcttgaggctgcaaatgtagtgggaatccacccggtggacactcattgctgtgccccccacctttgtaactgctgcctctctccactcttgaattagtttctgtatttgggagttgagaactgtaatgagccttttcccctgttgttggtggacagtcctttagcaccaggttgtgcctctgtccttgctgtctgtcctcccctccccgtgcaaagaccttggggttttgcgtctcagttgtgggtgtcgagtgctggtgccttatttcaacagtcaggtggggtggcagaggtgatgtgcacatagcttcctgtaaggctgtccccacagtgatggctttggaggggaggaggggagtctggtctactttagaagggcacatactgctagctagaaactgtttctcccttgctatcattgcttagccactgatacttacatggcttttgagtcctgaccactgccttccttttctttcctggggttcagagaaagcggggagacaagcaactcgagttgctcatttctttgtcacttctgatgtcaggccatggaggagagggcaagagcaatgcccctcgctgctcacttcgatgctcactgcctcactaagcctcagtctgtttttctcttgatatcatgtgacgggagtctcagtcgaggtgaggcaggctggctcattgcctagcaacactattccaaacactggacgtttgagaaatgaaactaagaagcactatggcacttggaagccaatgggagggctcagcatctagcccagggcttggctgagggttcaatgatgagatctttttaggatgaacagtgaccattaaacaggtcacagtccaagtcctgtgtgacttagtcacacagactgtgcctggataccgcaacagagattgctaacactggagactcgcttttccttctgaatcttgtttcctggatgacagcgactgtcagaaattggaagcttccagatatgatataggcacacctcagttcttcataatttgttcatccactccccaaaagtttactaaatgtctgtcacatagtgggcactgttctaggtatgggaggaagggtgaggcttataaactctgtgcctcaattttcccatcactgaaatgcacaggatgaggttcctatagctgctgtgaggactaagagtcactcagtgctcagcagcaccctcagctcttgcagtgtggatcctgaccacagagaggtcaaagactggaagtgagatgtggccgaatggcaactggacaaggaaggggtcagaaggagtgacacaggagggaagggggttatatgggagtgacacaggatagaaggagtcatatgggagtgacatggctgttttgtcacccgtgggcactaaccgccttcttgtcgctttcagtcatcacacctctctcaggagtgcatcctgagcaggaaatcctagcagaagccctgaggttgtgcactgtcaccccagcccagtgcctgaaagcgtgaacacctttgatcgggtgctgcagctgatactgacactaacacagacattcctcaccctcgatgccaggagtgggagggaggaggggacagacctgtgtggtggagtccgtagggtggcctgagttggagggatggaaagctttgtgcatgggtgtggtagggctaaagaagcctttggagagatggggatacttgccaagaagagtggggtagagaagcagcttgagagaggccattcccagcggcagtaccgtggacactgagggtgtctaccccttgtcactgttgggaagcattgaggaaatgctgtcagacagcagcaggcaggggattttccctggagtagcagcagcatagccagagcacggagcccagtctcacccgacaccctgccgtggccttccatagttatggagaaaaaagatgaactgtacttaaaacaccgatctatacctttctggtttcctggctgtggcaatataaatctaagtatcgagtttcagatccagcaggaaaaagaatcagaaccatttccccggagtcatggctgctactgggtcccagccagcaatggactttgtttgaagagagtatcctgtgacactggtccttagcataggaaattgttctctaggaaaaccaagcttggggtcactctggctagactttggcccaggtagtttaaagtattttcctttctccttatcatccgagtggccttgcactgtggctgtatccacaacctctgaaggtgaactgatggcaggtccccagtctcacatactggactgaaacattctccattgtggaatacttgatgtgatgagccctctgagtttgggaaacattttgttagattttctcacacacatctgcttgagatcttgaatacagtgtgcctcttactctgagtacccgtctctttcaggacagatgcaagggacacgtagcagtgaggcatagagattgcagagcatggtggagacctgccctgccctgccctgccctgccctgccctgccctgccctgcccttccccgccccacctcgcctccctgtgtctgctggtctgtgtcagcctgcataactcttaacctaactctgcttgcatggtactaaagcgtgtgtgtgctttcctgtatgtatgtttatgtgtgtgcacatgtgtgttaggctagaggacactctcagctcttgttcctcaatcatccttgtttaattttttttgtgttattataatttaattatgccactttttccttcccattcctccctcctattcttggctaaactttcagttcatggcctcttccttcattcataattgttgttacatgtgtctacacacacacacacacacacacacacacacacacacacacccctgaataaataagtccagctatttagtctgtactgttacttgcatgtgagtgttcagggctggccattcggatggataaacaagtggtgtgctcctccccgaggaagattctcccactctcagcattcctgccattgcctgtagttcttgggttagggttggggcctcctgggcattctctcacccacgttaccatgtctacctaattttctgagacacggcctctcattggcttgtcaggtagctagactggccatgaagcggacctcaggattccagggtttcttcctgcaccgacactgttgcctttgctttggggaagggccaacagcagctcatcctcaggtcctcactgacagatgaacatccaggataaagtagacttttgtctcctagaagcaggggtgactcacagaggaagatgtgctgagttaataaggggatggagatggtggtgcccatggctctgaggaaaattcccagaagcccctgagctcagcggtatggcctgtcagtgatgagccatattacttgaagtggagtaattaccccagagaaagaagtttgcaaatttctcctggtgttggagtttagtcggtgattgaatggagaacttgggagccagccttattgcacagagagctcagcagtgggtgtcctgtcagccccgagtaggtgtcgacgaagactaattgctcatccccctgccatccgtcttcactagtgttcagcccctctggggacagagcagacacctccatcaaagcagctggaaggaggacggaggttcagaagtgcctgttgttgttgtcttcactggggactgaggtgcttggctggcgtacctttgttttgcttatccctggccaatattgttgcttcagctgtcttggcaaagacactgagtagcactggcaaagttaaggtgggatttgtgtttgggacctagtccctgccattcagctactctgactctttgccctcccttcctcgatgctgcatcacttagccatcttcaccctcagacgtttagtgacacctcccctaaaagccctgatgaaagaggagacagagagggattgagattgtgagcactcttctttatccttggggccaggctgctggactccacgccctcctcattggaagtggccaagggaagcaagccaggaagccatgctcccccaggcttccattcagtttctttctctagattcctccttgagctcttgctttggctaatctgatggaggcaactcctgctgttacagacaccacactcattttcagcagaaagcaagagccagcgggaagtattggcactttttctctattgggaaatggactcctctttctgtctacttcacaggcttctctttgtgcctcactgaccagaactcagtcccctcgtccttctagctgaaggtaaactggagaacaggtattagccttctattctgtagggtagcaggctgcaaaggagaacagagccccagcgttacagtgtcgtgggacagcttcccctgggatgtgcagcactggcaacccgctgcttgggatgctgtcaggtggctttagacaggaaaccctggtgagtgagaggccttcctcagacgcaaggaaacaggacgagtatcttgggggttcatgtggggtctgggaaactgcttcttagaagccattgggtggatggtcatttgttaaggcgtggaaggactgtcaccttacgacagtaagaaagcagtaggtattaagttaatgaacactaaatgccatgagttgttcaatttctaattacgttcttgcaccaacatggctgcctctgaataaccttcagctcttagctcaagagtgcagttatgtgcccagcacagacagaggggtgcaggtgggcatggaactctttcctgctgcatgaggggagtcctgcgtgttccacacagttggcagtcatcagagtgttggtggaagtgctgggtacacatagctccaggcagcaggacaagctggatggagagagctccaagtgggttccactgttgctcacagctatgctccaagccgttagaaccctgcttctgtgactgtgttctccagctttcctatcgatgtgacacagtacctgacagcaacagtttaagggacagcttactttgactcatgggctaagtttaccatggaagaagaggtgtggtggctgggaggctttgtccaaggcagtgggaacttgtgcatgtcttgttcacattctggtgatcaggaagcagagagctggggtggaagccacaaagttaccagcttcaaggcccgcccacagtgattcatctctgctaggaagaccgtagtcataaaggtttcacctccccaagcagagccaccacttgggttccaagtgttcagacacatcagcctgtgagggaccttttacctccaaaccacaacagggagccctgcttgtctccactgtgaatccacggagctgcctctcctcccttcatgctgcctaggattgggaactggaggagtagtgaccttagcttgacatcctggatcctacagagctccttttctcctgtcccatcaggtcacctccataactttggaggcacacagtaggcttctcattctcttttcctcatcaactcatttctttaacttttaaggcacacagtaggctcctcattttaatttcccaccaaaccacctccttaactttggatgcacacagaaggtaccacagtcttcctgttccagaacccagggcttggcaaaggcaagctgtggcctgatggctgcatggcgtgtgctgtttctggggctcgaacccatccatattgaaggtggagcttgtgtgctactgaagagttttgtgggtttctgcagaagttccacagagtggaattcatctgggccctcccaatagctgggtgcttctaattaattgcagattatgtgtgaatctgtttgagacttgccagtgtatctgataccacagcctgagggtgggtggaagctgtgcaacgtggcatcctaattatccgtgaggatttcacatgcagttagtcttccctaccgtgggttaactccaccatcccaccatgcatgaagctcaaaacaacagatgctgacactgcagccctggggcatggcagactggcagatgtggtcgagtcagagccatgtgttctctggctgaactcggccagttgtccaggtgaaggtaggagaagatggaggatacgtgtgaacatcatatctgcaggttttttctgcttctggggagtcattgcacttcagagctgggggtctgcttgatgggtcattggttgggtaccgaaacccaaggcagattgcatttagcatctgcttccccagccctcatctgccatctgccacttgtggcaccaaacaagtataaggttactcttctcacctctatttctccttcatcacagaccaccttgacatcagtgccatctccgtgtgacttccaggttgttgcctatgatgtgtagcttgtttggttgcgagtggcaggccaacctaagtgaaataaggggcagtacttgtggcacatttacatttagaccactggacctttgggttttgtatccgcctgcggccgcacgaactgggttcctcagtgggaggccggagctgtaagggaggaaaggtgagagaagagaccaaggcagattgctgatcaaggccccagtgtttcctaagagtctgtgcttaaagggggggggggcatcccctgccatgccaggcttcttgatgctttgttgctaagttgttaacactagtctgtcagagctgttagcattaggtgccaattccacaggttgccagctatctcagaagtatctcaggaagacaggttcagcctctcggtgggtagcagcttcttggagaagagcagtgcaggtgacagaacaatagagccatcatggtccgaagactccaccctaggtggtctcattcacagttccagcaaggtctgaatcagtctgctcacggctggggaggctacaattcctccctaaatatataataaaaattagctggattggggcataaaatttatttatgctccatggacctgcctgggaattatggtggctgtcggccgtgcctggcttgggactaggttttctatgaattattcttatcagtcaaggaggtattgcagcttccttgtgtttactttgcacaaacatgactttatggtgctattatgaataaaccacggcctctgggcacctctgtcttagattaatatagttcagaaaccttagttgcctgtctttggctaaccagccctcatagcaccccttattcccaatcagaccaaagccacaatatatattcaatacatttcttcatgtggtctgtgaattgtatcttgggtattccaaagcttttgggcaaatatccatttatcagtgagtgcataccatatgtattcttttgtgactgggttacctcactcaggatgatactttctcgttccatccatttgcctaagaatttcatgaagttattgttttttgtttgtttttgtttttttaaaaagatttatttattatatataagtacactgtagctgtctttaaacacaccagaagagggcgtcagatctcattacggatggttgtgagccaccatatggttgctgggattttaagtcaggacctttggtctcttctctcacctttcctcccttacagctccggcctcccactgaggaacccagttcgtgcggccgcaggcggatacaaaacccaaaggtccagtggtctaaatgtaaatgtgccacaagtcagtgctcttacctgctgagccatctctacagcctgaagtcattgtttttaatagctgagtagtactccattgtgtaaatgtaccacattttctgtatccattcctctgttgagggacatctgggttcttcccaacttctggctattataaataaggctgctatgaacatagtggagcatgtgtccttgttacatgttgggacctcaggtagtactatgtccaatttactaaggaaccaccagactgatttccagagtggttgtacaagcttgcaatcccaccagcaatggaggagtgttcctctttctccacatccttaccagcatctgctgaggcttttttttttttttttttttttttggagacagggtttctctgtatagccctggctgtcctggaactcactctgtagaccgagctggcctcgaactcagaaatccgcctgtctctgcctcctgagtgctgggattaaaggcgtgtgctaccatgtttggtctgagtttttgatcttagccattttgactggtgtgaggtggaatctcagggttgttttgatttgcatttccctgatgactaaggatgttgaacatttctttaggtgcttctcagccatccggtattcctcagttgaggattctttgtttagctctgtaccccatttttaaatagggttatttggttccctggggtctaacttcttgagttctttgtgtatattggatattagccctccatcagatgtaggactggtaaagatcttttcccaatctgttggttgctgttttgtcctattgacagtgtcctttgccttgcaggagttttgcaattttatgaggtcctatttgttaattcttgatcttagagcataagccattggtgctttgtccaggaaaatttctcctgtgcccatgtgtttaaggctcttcccccactttctcttccattagtttcagtgtaacatctgattttttatttgaatgctcttggaccatgtataatgagtctgctatttgaatgaaatactagctgttgaattaaaaacatggtgaagaaatggttaatttggggttattgtttcaaaagtttcattaaattcggttggttgactgtagtttttgggccaggtacagtgctggagtgggagcttgaagtgcaggaagctgctcacctgtaggtgagaatctggggaacaaggagagagcaaggaagaaaggcattagggcgccaggaccccttcaaggcatgtgccttggttactaaacttgtgtcatctagactttacctcccagagggtccagaacctaccagcagttgcactctggaccaagccatcaacacttaagactttggggtgaattaaggtccaaaccataacagggtacatatgtcaacattgcaaatttctcccagaggaagtcctttagaggaccaagggcaggggcctcctccatcttactaccctctgtggtcagcaagggccttcacttccttctgtgactctgacctacttctcattgagcctcagtctgtttttctgaaaagtggaaacagccccagtctttgaggattgttcagaagactgactgagacaatgtctgttggttactctgacccactgtaggaacttataaatataggtaacagctctcacctcaactatgagctgtatcaagccctcctcttctgagaccctgcttctgtgcttcccaaacttggctgtacattggcctctgatgagaagcattaacaaacaacacaacaacaacaacaacaacaacaacaacaacaaagcaacagtgatggcccctggtcagagctctgcagagcagaggaatgtgcgacctgccagactggagaacttctacccaatccgtcagagtgtgccactttctgctctgcctttctgtgctgtcccagggctggaggagtgacgtctgaggggaggggctctcctttcctgcccctgggtgctatcctagggaagctgccctgctaaaaaagaaaaacaaattatgccatctccctttataagtagcctcacaatactgttgtttctattgtctctaagcatccttaaagtatcctggttttagtctactaaatacttctataaagctgaactgcctattttttttttttaaactttaggtagtaaagtagaagactttttttcttaaaagaaaaatatcttatttaattttcttaatttatataagtatttcttgattttttttatacagagactagactctctcttcttctgtgtgtgtgtgtgtgtgtgtgtaatgaataaaatacatatgtgtaaaatattaagtggcagaaatgcccctaagcctgggtttctgcttctattggtttccagtacctaggtgctgtcttctctagccttttctgagttggacaggacaggacattaggtctccgtgtggttcacagtattcctgggggagttgccccaggttgctaagttgcgctattctgtcttcttgaagttttgctgcttctgtgtctgacataggcccctcccagctctgtatgtttgatggccgtggtgcagaaaggccaggcgcatatgttcctattactttgatattgctgagttggtgaggggccgggaactccagctttggagcagggagttttacagtggtggtccgcaacctggtcatccaaaagcctgcatgttaagaccattggctaacagcagctcaggctcagctctgtgggaagagcaggttccagctgctcggagccatcagaaatgggggtagcctgacttcagcccactgaggacagtgggtctttctctgtgcccacatccctctaaggacctcatacttgtctgtcttttcccaggtggccctgtcttacacagaatttgagggaactgtcctggtgattagagagatgaaaaccaagcctgagtacaaactcaggctggagagtagttgggaatagagcggttaaggaaagggagcaatgactatctgggaaacaggctgcctggtgcagaaaaggacagggattttattgaattcttagtgaattgtcaggctgtgatgattgtgtgtgtgtgtgtgtgtgtgtgtgtgtgtgtgtgtgtaggtgtgcacacaccatcgtgacctgtagaggctagaagataatcctgggtgctggtgcttgccatcttccttatatgaggcagcctctcttttgttggccactgaatgccaggctagttctgggattctgtggtctctgccttctgtcttgccacaggagggctgggttatggctgtgagttgcctcattttatctggctttacatggattctgagaatctgagctcaagtcctgatgcttgctcctcagccacatttgaaaaaagtaaatctattcctttagtttaaggggattttcccatgtaaaatgcaactcagtggccactttgttcctggagacaccacgacaggagcctgtagtggcaggattttcccttgtcataacaaactaagggataggcacaatctatatgtgctaacaagggagggaagagcagggcagaaagtggcttctgtggctcaggggtttgagggcctgtgctcttctcttcataagcacatctttattatattagttatttacttatttttattctatgtacattagtgttttggctgcatatagatatctgtatgagggtgttggatcccctggaacaggtgtttttgacagttttcagctgccatgtggttgctgggaattgaacctgggtcctctggaagagcagccagtgctctcaaccactgagctgtctctccagccccctatcataaatttcagggcacctgccttaaagacttgtgctttatgccactggaaacaaatactgtatgtgaatatatatggggaatggggcagacttgtctggaagagtatagaagtgactgacagaggtgatgagagtgtggagccttctcaggaagttggaagatggctttcttctgtgcctaacattttccctatgtttttcttcctgcggccatgggtttctcaagcccttatgcattctgattaaacagaaacaattgtttcaagctgaatggggccaggagttcatcagttctggttttctagaggcagacagaaagcagttggaagaattgctggatccctccaactgctggatgggacaataggatagggtgagaccactcagctaccagtgtgtcaagggataggtttgactagggagcctgccttggggggggggggctctatgccctctctttactagctgtatgacctaggaccagtccccacccttgtgtggcctgtctcctcctttgtgttgtgcacatgagtgtctactctactacctccttctctcccagaagagatcgtctggaagctgtgtgcattgctgggcacacggagggagcgcagcctcatgtggtactcctgggcacctccgcactggcaagctggcctgacacacttttgtttctctttttccccctccttattgaagtagaagctcttggtggggctcaggcagggaaggttgcaggaggaagaaacagcagaaaaaggtacagtgggcctgagattgctttcaagttatattttgaagctaaggttagtttatcctttctctggtggataaggaaagggagtgggtaggaagacaatgatataaaagtaggatgttagattcaaaacgatgatacaggttaagtacccatagaagaacatttttatttctgtagacatagttttgtgagttgctctttaaatatagccaagtatgggcctcagggggagtgtttgtaaaagctcttgaaagtctatgggaaagatgttttataaagccagatttaccgcacatataggagcacacatgtgagtgtgtgtgtgtgcgcacacgtgagtgcacacacacgtgcacagacatgtgactgtgtatatgtgcacacttacccccatccagaagtgctgtttaaagagggatctaagaccagttagcctcagggttatcccctcccctcacaccacaatttacttagtagctatgggctcctttgtgtgagcaggccagtggctctgggctgtgggtctctggtcactgttaggcgtctgggtgttgaggtgggttcttgctcttctaagccttgtgaaatcatactgagtgttcccgtggccatttagggttggggagtggacatagctttgttggctcatccactttaggttatggctttgacatgtaggcttgtctcaccccttcctgctgccccacctccttcactgttgcatgcatcacaccctacagactcatgatggcaaactctgtactttggcctgaatgcctgtcagcggggcaggaaattacagctttgaacccagtgtttagtgttcttggatgaggccttgagcttgttattaaaggcaattgacttttctgtccagcccatttgacactcagttcctggagctgagggtgggttttagcagtgggccacagtgaaccatttactgttgtgttaattcacttcttcacctgaccgttgatctattcagtagttctcagtgtgtgctgcggtcaggtgctgctccaggcatcctcggatggctattattgaacagctatagctaccagacaatagatgtgtgcatatgtgagagaccttagaagaacaaggtctagctgataatgggaggatgcagaccctttccagttcagaagacaaaggcagagatccactaggacttgaaggagcctggcacacacatgtgtgctttccccggctcctgtagctgcatgtatggttgccctgtctcctgtagctgcatgtatgtatggttgccctgtctcctgtagctgcatgacctctttaagtcagcctggacctattgctcctgtcccctaaggtagctgtcatggctcctttgtctatcaggaggccttgccactgctcaagacagtcatacagatggtctgcagtttcgattgtctgtggccttctgtgagactgcggggctctgacacatgtgtgacactttaccatttctctgggctcccaatgactcctctgtttgatgggctttatgtactaatgtttgcatttgacctacttaggtctctgtacctggtgcctaaagaagcatagcaagaatccagcagtttcatttctcctttcaggatggcaatgccaacttggcctttgggcaaatgagcttttagttcgaggaccttgctgactggctttagaactaggtcccttggctggatgcatctgtttccacctagctttatctctgcagtcttagacaacagcccattcattttgtgaaaattctagatgattggctcaattggagtcagttgtcaccagtgtcttcctggtgtgtatgggctggaggcctgtggcagcagagtctggaactggattggaaataagctggggcaggtctgtgatctttagagctgccacagacctgagagagcaaaggtgaaccggtggaggatactttgagaggaagcttgaagggcagctctgagttggggctcagataggccgtttaggaatatgcgctaagacacagaggcaggcgagaaggagagcagttgatagagtcagaagaaggaaaagatcagctaatctagagctatccctctccctccctagtgtgggctttaaagaagagggtcaccacaactggcccacctctttttctcttaccaaagctcctgtctagtcccttgtctggatgtagccagagtcagggccacatgcatagctacagagagctccctttatctcttatttaaggcagaggcagagttgaggtggacagggtggagagtgggggcaacacatgctgtcatgttgtgaaagcaactgtagacagtatgtaactgggtgaatgggggtggaggggcagggcccccatggaatggccatagaccactgccctgcccggtccttagtgtcttagccaagactctcccactgagcaagctgagaggccggggcccgaggctcgggtgtccagagtggcacctacattccctgcctgggcttgacaagcttgttctgctctcctacgtgccttccagaccaggagaggaacggaaggagtgtttgctcaggtatttatagttttgattgcttcatttcccatatttaagtactgttctgcctgggacttatttcagttcatagcagaagtggagcttgaagtcttgttttttgcttccaaaatggttccttgccttggcagcatttgtagacaaagccatcctttgtgcagtgattggaaatgctttttatcccagatcaatttctgacggttgacactgacattttcctgtgtctggctgcatttgctgctcactcttctgcagccaagcagagaactgcttttgagaggtggccatggccattcagcttcgagaggccctacctggcatggccaagctcacagaacctggtggtcaggaccctgctttgtgtttttctggagattttgcctcaggaaagaggcaggaatcctggtgttagggactaacaagtaaagagctgtgccatgttggagaggagagtgctcgggagggaaagcctctgctcaccagaagctcttgggattaggggctgggaaagtcccatggaagccacactccctcactgctgcctggaaggcatgagggcagcagagcagcagggtgaggttcacattagagctatgagccatgctcttcccgccatcaccactgctccccagtggaagctcatggaaggcaggaggggtgctgggctggcagcccttcgctctgaaatggactcccccccacccccacccctgagacagggtttctctgtgtagccctggctatcctggaactcactctagaccagggtggccttggagtcagaaatccgcctgcctctgcctcctaagtgctgggattaaaggcgtgcgccaccactgcctggctctgggatggatttattttttaaaaggttgccataactatcatgtcatgtctgtacttgtgactcttgtctatcactttgatgtttgtgcaaatgcaggctcccttcaggaggctggtaacagcgtgtggagcaggtgtggtcatgctgggatgacggagctggtttgcattggcttcagctgccctgcagcagctccatggtgcctgctgcacagcaggattgggggtctgcacagccagcttcggccagactcccctgtggttactggaggtggctgccactggttgatattctgtgtggttcgggatccagttctttaaaacccacccatagaacgtaacattcagctgcaaattggaatgtcagcatccagactcctcctttctggctccaggtgccaggattcagatgcttgctaagtcttctcgtggtacatcagtgctggcctggttgacccacattgcccattggatgctgtttgacccttggagaatctcttatctgatctgctgctttataacagagagcattttcaagtttccttttaacatccaaggttaaggagcacaggagcctagtatagcccacaactcctgcagaggggcccagtatgaaggactggtactatgtttccaccttggattgaagaagggaaagggacagtgagaaccatcagtagtacctgataaatgtcactgtgttctaggcacctctttgcatattacctcatttaatccttacagtatttctgtgagattgtatctgggtttggctggttcttgttgagagagggttttatgtagccaagtttggccttgaactcttgatcctgctgtttctacttcctaaccctggggttactggtatgtgccaccacgttttatgaaactgagactgttaagatcccactttatccttaaggttctcaaagaaggtcactaaaccctgtgaccttagaaggtcagctggagctgggatttgaggggagtacctgactacagagactaactcctgtaagtgctgaagctgagcggctgccccgtgcttgagaccagccatcctgtggggagtgaagcacaagtctagcctgtagtctgcaaatacatatacctgtcacggttgcctgggacatgtggctgagtgggcccagagcctattgttagcaatgtgctgtaggttttcttctagttctggaatggaagctactagaatctgtatctgaacttcttcttgcccttcacatctgcccaccaggatgatttcaaccatcataggtggtagagatacgaggtactgggtattctggagggactgttagcatctgtttcctgctctgtggtattgattgcccacaacaggacgctgagactagaaacaaggcttgctgggcagaaactttgtagcttcatagaaagtgctggtattgtcgttgaatttctgtgtgtatgtattgtttattcatttatagttagcatataatgtaataagtgttattgtgccatttgcataattatatatcattatcccctccacgtccccagcttcgtttgctgctctccttcctcggttgaaacagcccctctgctgcatgcattcatcaccttctcaccctgcttacacacacacacacacacacacacacacacacacacacaaatctagattccacatatgagagaaaatgtgacattcatcacttggagtttcgctgatggttttagaagtatggatgttagatcagagtagcctccctgaccactcatctttctggaatcaaaccaaacaccttggttaaacatgcattgaggaggtatccttggaactgagttgtgcagatggtatgtattctattttcaacattctatgtgcacatagggaagaccaaggtctcgtagtttggcttttattgctgtgaagacacatcatgactatagcaactcttataaaggaaaacacttaatgtggctggcttatagtttcagaggtttagtccattatcatggtgggaagcatgacagtatacaggcaggcatgtgctagaggagttgagagttctacatcttaacctgaaggcagcaggaggaaactgtcacactgggcatagcttgagcttatatatgagacctcaaaacctacctatggggtaacatagttcctctaataaggccacacttcccaatagtgccactccctatgagccacacatttaaacacaagagtccatgggggccattcctagtcagagcaccacacaaggtgactcacagtctcatgccagtagcagctgtagggcaagggcagtcagggaggcttctcaaaagaggcacacacatccttaccagggcctaggcagatgagtttaggttattgtagaatgtaagtaggagaccctgaccagtaaatctggataaaatctgtgtgtaataacttccattttcaagggaggtctgaccacaggttgtgtgccggtagtgcagtcaggatcatctggagaccccccaggaggcctctgatccacacaagctgtggctgtggctgagctggggagggaggttggacacagatgctcacagatgctcgcagaagcttgggattgtgctcctgttgatgagctttctctctgggagaagcaatgcagcatggagggacaaagggcttgtcagtgtgacagcacctcacctaactactccaggccactctgtgctgtgtacactggtgctggaagtgagtgcccccgtcatttactgcactctggtccttcctcatgtaccacacaagcagttcgtgagtgtcagccagctctgttgctgcggagaagagaggagtagacagggctgctggcagacagtgcaggatctcgagttagcagactttgtgccttctagccccggatggggctgtgagcatctcttcactttgctcatgtgtggttcaggctcagccaagtttgccagggggaaagaaagcctagaggaaaatttagaatcctcaaaggtcctggggtggaggagtagccaaagcctgtgtccacagtacccacagcactaacctggctagcctgaagactgagcctagaatgctttattctacttctgttgatagaacatcgagtctgattctgttttccttcattgccacagtggcactgggagacattacttgctttgttttcctctatagatttattaattagaataacattcttaagtgctagcaacagtttgagttccttctgtgcttcctgctgcagcctttgagaggcactgcctgcaagacacccctgtctcactcttgtctgctgagaagggtgctgcttgctccctgctgtatgaaggaaggccacacagaggcaggattctggagcgaggctgggaccactgacttggcttcacgtgggcttgtgatagtcattgttcctcccattaagagccttcttcggaaggcctcttcttcctcagatcaggtgggagcctggctctttgcttgggaagctctgtgaacctagtatgctcttggtcgatgatgagggaatggacatatgagccctggccattgtgtctccaggtagggtgtgactggtgctcagtggctcatccctgccagttttctgccctaggccttatcctaagtcgtctctgtttttcagggatgcttgactaggccacagattagcaccttcctcttgttcctcaccctctccttgttatctctaattcttactaataactcttatggaaaggcattttctagctaccttttgtattgtgagacatttttaaattgagggcatttggtagaatcatcaatgcctctggtcctaaaccatggagctggctactgagcccttgagcacccctgttgtgacctcatgtaattggttctggacatggttcttggacgtagtcacagactattcttagatgtgggccctgtgcttcctagccacactataaggggaaatcaaggagacagatgaaacaatgctgacttctccagctcttaagatgtagctagaatctggctatgccttcagtgtgagcatagcaccagtggagaagcttgatggaggtgggacatttggggcgtattgtcattccctagcctcaaatgctttttctgtgtggaaagtgtcagtagagtggctttctcaaatatttgtgcagtgtacactctgtattgaatgttatcctatgtcagctgtatgctaacctcaggaggcagtgtagagagccagatgtttactaatgatggactgtctttatgcaagcatggagttcagtactgcctgatctgctgtctgggctcatgaacatctgtatgaggcaataaatcactgttcacgacagatgttgtccagaaacagagccttgggaaagtactcagaaattacaagctgagtgtgttcccaaagaattgggaacacccttcctcccaacatagaattggttctcatctcacattgtccttctgtttgtgtggtggatgaaggtgacagttgagcccattgagtctctgaggctgtaaaagaattctctctagggaacagggaatttacctaaacatgccatatgtaatggcatgtactgcggacaagcttcaggggacagcttggctgggataatttgctcacaaatattgcctttgctttccttttcagatgaactgcgccaagccatcgtggccatgatgaacagaaaggatgaattggaagaagagaatgggtactgtgatatcacagctgtcattcatttctgttcccaggagagtatgaatggagacagtggtgccttgttgccatagctgtgtgtgactgacaacttcttaccttactattgctttaaattcttgtgtgtgtgcgcgcgcacgcatgtgcatgtctgtatgtgtaggccagagaggggactggatgccacgaagcaagatttacaggtagtgtttagtcgcctgacatggatgctgggatcgtaccagatttcttacttttgttgaatggagcatttcagtagacttgctatggcttgcatataagcaagggggctagacaagcagaaacactagtgttaccttcggaaaagaaggatgtggaggaggggcctccagtgacagccctcactgatacacacacacacacacacacacacacacacacacacacacacacttcagtggcttttcatatattcccagttatatgcagccattaccatggtcagtcttagagtagctttatcatctcaagaacatatgccacaccacttctgtccatctccctgcctataaaacatccttgaagtgacctttaactaaggatttatattctgtgttccagttccactcaaattagggctactaggggcgacatgacatttggattttttaaatttggccaaaacccactccaagaggcagagtgttttcttaattttctcttcgttccctattgaaatccatactagaaactaccaggtgccaccacgtgaatgtctgaagttgatcattctcccctccagagtctgtgctgaggctggggtggctagtggcaggcttgcccgagattattcacaaaaatctgtgggcgccagtaggctgcctgactcagggaggtgtgcagaggggtcacctgtgtgttcaagctacctcctgtcctttcctggtgacagcagcatctccggctctcactgagaccttatttcaggtctagttgacaagctgcttgctgttcttcatggagacagatgaaggcaaagaagcataatttctaaagcagaagaggctcttattaagagaggtgtagacagtgccatttccacctcacacaaactcccacccaagacttctctccactgccaggctcattttctgcgaggctcgttcttccagctggagcaattctctcggaagaagccgtggagtcaccttcccttgggaagaatgacagctactgtatgctgatttcttcttcccagatagaatcccccatggtatttctgtcagggggtggcatgcttcaggaggagactcctctccaagctcttggagagctcggtggcagcggggcactgtggggcttggtgtatctgatacatcctgatattcacagcagacaccctctgcatgtggcctgtaaacacatcacagttgggtttctagaaatagccatttaggtgcagtgaagcagagccatacctgatttaccttagggtggtaacttgtgatccttcctattactgctacccctggtcactttctggggtagaaatgtatatgcaaataggcatgctataaaagctaaaaagtattcggatctaaggtaatgctgtgctaaaatgtaccccataggatgccatgcatgccagcttaccctgtgctgtgttagtatgtactccataaccactccatgcacactggttttcatggtggtggcagtggaccgtgggtcctggtgcactctatgggcagcagtggaagcaggaagagaccgctgtcatcgagtccaagcaggtgttctgtgcttctcttctgcagagtattcagttggcctgttaggaaaccctccatctgtaagatctcttacccactgaggtgtgtcagagttgctacacctttgactggagtgtccttaagagcacctccttggcatttgctacctccttgtttcccttgatctcaactatcccaggaacagggactcagcgtcttaccacaggtacctgcccagggctcaggctcttggcttttgtttgctgtctgctaatatcagcttagctaaggtataagtgcattgagttggtgcagagcctgtgggcagtgatgagccttgatctgggtgggatggatgcacagcctctgaacggtggggccctcttttgcaggtcactgcggaatctccttgacggtgagatggagcactcagcagcgctccggcaagaggtggatgccctgaggcggaaggtgacagaacagcaggagcgccatgccacaaaggtccaggcactggccaggtagacggggccaggcggggaggcaagaatgtgagccaatcccacacacaccttctttcccatttgtctctgaagaaaggccttgctgtgcatggtgcccaggcaggcctcacacttggcatcctcctgccttggtctccaagtgcagggattgcaagcatgtgccagcacagctcattcatacttctagaaaaccagaaagggagtaccaaaggaagctacagttgtgcattttcacctgacgcacttgtttgaatgagggacacacatgcatgtgtgagtcaggaggttaactgctgggtgttttccctttcctgcccctcagtttgctccctgctgtcttaaccatagccaatcccgggattccgtgtgcacgaggcagatttatgtacatatgagtattcttcccctcttcttcacactacattccaggcaggttctggaggggtgtgcccagggttgccatcttctttctagtagctcctggtgtgttctggcctgactgtattaggattgggttaaccagtctgctcgtagtggacagtaaggacattttgtcttctgtgatacttcccggtgcataacctgagtgtctgccactgtgttcccacttgagtgtgtttgctggaagcggttctggacttgctggtcagagtgcaggcatgtgcaggctgtgtccttcacaggtactgagctgaatgggccccacagcattgcggtaaatggtgctgctcccagctcttcttgtgggagcaaggtttcgggtcttataatattacaggagaaaaattaggctggtgggtcatttttcaagagcatttctataattataaatgttactaagcttattttaagaggcactaattattttttctgtgatgtcatttatatcttattagataaaacatgatgaattaaaattcccacctcctatgagagcaccattctttttcctgagtgcattctcctgtgggcatgcatatcccctgcatgtgcggctgactccccatcgttcctcatcttgtctcccctgccacctcttactgtaaggcagtttgaggttagccgtttgtgtagacctgtgtgtggtatttcattgaactaatgtagcatattaaattgaccacactaattggtcagtttagcacttggactgttcccagttttccccattttcggtgacgtgagcagcgtctactgtgacaaaacatctatctgacagatgccacttagggaagaactaacatcaccacagcagacaggaagtggtaatgtggctgctgacatcaccacagcagacaggaagtggtaatgtggctgctgacatcaccacagcagacaggaagtggtaatgtggctgctgacatcaccgcagcagacagaaagcagagggctcacattggtaccagaaatgtaccaagacccacttctttttcctagactgtactctaaaggttctataacctccccacacctcccacacctggggacccagtactaaacacgtgatcctgtgggggacatttcatgctaaaacactaacattggtggttctttggggtatgtccagaggctgtgttcggtgatgtggcgtgagtacttttcatgttcctgtaattcagcacagtcctgtgacctcctttctacattccattctttgagcttcttctctttgcatcctaacaacctgtgggccatgacccctttggtggggcattctaactacccttttcacagaggtcaactaagaccatcagaaaatacagccttttacattatgattcatagtagtggtaaaattacagttatgaagtagcaacaaaaataatttaatgttgtgtgtgtatgggggtcaccacctcctgagaaactgtatcaaagggtcacagcattaggaaggctgagaagccctgctctaggacatcagagccaggtcagaggtagtcagaagtagagtaattagttcctattgtgcatttcttcactggtcttccatctcacgtgacctcactggagctctgtggtgtatcctggctcgatgactcaagtcttcagagacactggctttgaacatcgtaacaggatagggctatggtcccttcattgtgttggcttgtgttaggagtcagcttagccctggctccattcctggaaattgtgtttctgggtgacttgctcagcttcttcctcacctgtgtgggagaggatggtcctatccactgacgtggacagaggaggaaggctgctggagtcttgagacgattgacaagctgctgtgcgtgttttatattgagtgctctttttagctgtggtaatcccagagaacaatttatgctacacatgggatagagaccgaggtttataatgtgaagtcttcccagttatgcaagaactgtttcaggcacttggaagttggcagtttgcaggtggaaggacatctgtagaacagacaaattcttcaaaaagagaaagtgggagaaacccccctgagcagctggccacactggcgggcgagtgggtctgctcagtcacttgttgcttggtagctagaagggctgtgtgctacagtcaccatgggggagtgactatcataggctgaggctcatgtatgtgctggccccctcttctaacccctgaccccactctccagctcaggtggcaagatctataacacaggtggcttagtggtttagggtacagtttctggcattggacttaggggccagcgtgttagttaggtgaccttaggtgagctcctaacctctttaaatgtctttatttgtaaaatgggagaaagaaaacttgaatgaattatcacatggataaaaagagaccatgagagaccatttttgcttcagaaaatatgctttgtatgaagataatacatgctaactaccatcactttttattaattagttaactgaaaccttgtctaatcaaaggtgcattctaatagcaacagatgaaggatgaaaagctaggctagtcaggctcagaagagcacagtctgttctaagcacccgatgagagttcatgcgtgtgcgcacgtgtttcaccagccttgcgtgcttggtggtgaaacaaacacacgctgcagatttagcatttgcttattccttttgctcaaagttaatgactttcagcttctgctatggctcaacaaagaccaagggcgtgtaacttgtgcagagctttcctgggcccggctgccactcactcctgatgggcagcactataatcaggtgcagtgaggctgtgtaagtcacatctctaaataattcattgacttacttccagctgggagacagatgttagagaagagaagactacatttacatgagaagtccctttgaaggaagtctctggtcttgcggaacaggacagaaataactgcctcatagttctagaagctgggaaggctagggttgaggggctgtaccttcaggggcctcctggcatgtcagaatgcaatggaagccatcacatcatggagagtgggaggaaagaggccgaggagctgctcttgtaacagacatgtttagtactaagccgtggtggatgagggcggagcccttgtaacctgatcagttctttaaaaaattacttaaatttttacgtgtctcaatattttgcttttgtgtgtgtctgtgcaccaagtgtatttctagtgccagtggaggtcagaaggcattggagccctcgaacttgagttcctttcctccccatgggtactgggacctaaatttgggtcttttggaaaagccgtaagtagctgctgtgccatctcgccagcccctgcccagttcctaagggccacctctcagcattgctactgcatcagggattgagtctcccaattagagaacagggtcaaagtcattgggtcactctaaggacaattttctatctctgctcatcatgctagctgtctcttgtgtgataaatcatctcttaatttggtctccagaaacagcaagtgtttagaattttccacgatttctgggagtgaggtgtctgcgaatggatggggaggggtctttcaggaggtagaagttgagttgctggctagagttggtgtactcaggcttgtctcagactaggggctggtgtcttctgtctgtctgtctgtctgtcaataagaggcctagggtccttaatctgaaggtttctgtaggctgttcaatgtggctcccatagagaaagaacatgctccaggtggaggtctcgaggtttctgtcaccttggagagcacgctgagttctatagatacacagaacagcccggcagtgtgggaagccatgacactagggatgactatcaggatcagagtcagtggggaccatttcaaaagctgcccaccaccatctccaggtttcagcttcctcctgatacttcagggatctcaagagaagcagggccaataggatgtctgtacctttccagaaaaccacatggttttctgaggtcctgaggtattgatttcatatgacttgcgtgccagggagtttacctaaccttgtctgcaagtggcagcctgggaaatccagtgatgtggtctgaaggcctgggtccaggctgacagctaggagccccagggcaggagaggaccacccctggctccagaagtcaggcagagagagcattgaccttccctggttcctttgttttgtttggagtcctcagtgcaaggatggcacctggttgtcctgataaggtcccagcctggtccactaattcagatgctggctctccaggaaacacctcaaacacccagaattgagattcaatcagctccctcagcatccatgacccagccggctagaccctcacactccaccagtggctcttcctccttcctggctattcatgctagtgtcactctgctgcttcattccttggccaccatgatggagtctagctaatgtgtgtggctgatgtgctgagagcaaggttcagcattcttgcctggacgagagggaacctgggagttggtgggtctttgttcctttgaggaaagattctaacccagtgcatgaatgcacacacagtagaaggagaggggtgcagctcttcctgagggtggcacctgagctgctgaacccagcctttctgagctacttttcacctgccaatctttgttgctttatccagattgtgttggctttctctcatttttaccatgttctaacgaagggttcatgtttgtatgttaggggcaaacggtggactgtggtttttctgggcttaagtacatctgtcatcctcttgacagcccaagggtgtggacaagcgttctggttggtgccttggctgttgatagttctagactctgggtctgacctgggtgttggagtcctttctttgtccaaagcatcttgaagcctttgacactggcctccatttggaggtcagcttccttgggtgtgccagccctgcttggtcagtatgtaccctcttgtttattgttcctgctgggctggtagccagtgagatcttcacaatgatgtctatgtgtgagattgaggtcctcatggcacaacttttagggtgtgggcctatacagggaaggcaaaacagggacctcagtgccctgctcagatcctgtctggcatctctgtctgtcgagacttttggctttcaataaaagctctaaatcttatattgtctgtcaaggctcaagctctgcctttttctgttggttatcagagaactatagactctgctttctgggacaaggtcataggggatgttctgtcttgacatgtatctgccaagcacttagtccagtgggctgaccctctctttcttttggctctggcatatatctatcaaaagatacatatttctaaatccaggagtagtggtgtatgcctttaatcccagcattcaggaggcagaggcaggtggatcagagtttgaggccagcctggtctacagatcaagttccagggcagccaggtgaagtggaaacttaagggttctttggaaagtcacttgtgttgctaaggcaaacacatgaaggaatgtttcattgaagtggacataggtgaaaggccaaggcagactcatgaaggaaagttatgctgaagcagacacaggagaaaggatgttctgctaaagtaatcctgttaaaggacacatgatgaaagattctttgctaacaacacgcatgtattggtctgccttacattgtatagttgaactccatttgtcaggactccatagagagatatgcaccaagcaacttctggtggtgtgctgcggctttttgccgcttctgcagactgattggcagtgacttttgagacagatgcatgtgctgaggcaagacccggggaggacacgggatgtttggagggtataaaaaggactcacttggtggtctcgctttgctgatcttcatttcactgagattggcacagctgagaacttttcctggcattcctgttggccctggtgcctcctgctgacttgtgcagaggctgaggcctggctgtctctgctaggtagcgccactgctgctgatttgtgtttgttatctcgacgctaccaacctggactgctgtatgtctgtgaagtgtttgtgagtagagcaagctgctgctgctgacctgtgaactgaactgctatttctagataacacagatgggagttgctccaaagaacctttctaaacaggtccataagcccgcccctcatatcctttctttcccactacctctggtgagtggtgggctgtaagagaggttaaagtgtttaagaaccatcattaaaaaggatttgaaagcattaaagttacacaggagtggcagaaactgacattttccgggttccagctcaggtctaacatatctaatttggtcaaggtaattccatctccttccagcaagattgctgcagggttcctagactgtttcagaaatgacatgtggtctaattttgccatggagacaggggtgggtcttcagaactttggtgggagctcatctcttgtctgttggatggctctctcttctgggtaactttctgttggggtatgaagcctagagctgccttggccattgtgttctcatgagggaagacagcatagggtgagggtatgcaggcactcaaatgaggagcggtgggcaagagagctgggtttcaggattcactgggatgctgggccaacctactctttttgtttgtttgtttgtttgtttcaagacagggtttctctgtatagccccagctgtcctggaactcactctgtagaccaggctggccttgaactcagaaatccacctgcctctgcctcccaagtgctgggattaaaggtgtgcgccaccaccgcccggctccaacctactcttgaaggcctctctggaccttctcacagtgtgggctgatgaatccccactgctcttgagatgaactggagttgggtttctgtttcttgtcactttaagaacattcatcagcagaaggttgtgtccagcatctcctgacctacccaggtaagggctctccgtggtgctcatgctcaggcaccagcattgcacaacagttactactagcagtgacaatagcgtactgccaccaaaggctcaaatttaggccagaggcttcctcaggaggggcatgctcttgtgctcacctggtttttcttaccgctgacgtaatgcctggctcaaataggtctcagtgaagttggtctggtgagggagggaagtgttgtggggctagtggtggtgtgacctgacccaagttatctccaaggaatgcccactgggctcttcttagttatagctcagttctagggagctcttggacttgcttgttacctgttccaagactattttgctcaccatttgggaagtgaagctttctggaaatcccttctactttagctttagctagtgagagcattcatggatgacagaagcccacttagaggcctctgaagaagggcagtggagtggctagggaactcctgctgtgaaggagacctgtttctccacatctctctatcctttttcttgcagttggcttcattatcaggtttgatcttctctcatggtgactagaggatctgtaacagaccatggctgtgctgtgcccagccacttcacctcgtctccccagcagcaggcatctcttgctctcaggcccagatcaacgctccctgtatccaggaggtggcatcctttcctttctgaactgcaggagtgagtgtggggctggagaggacttccctagatgggcagcagtgactgtagacttcccatggtgattcctccccatcccatttaggtgctttagatgttccaaattaatgtattagtggcgttgggccgacagccctcagtggaatctgacaggagtgagtacactatgctacctcctctggctgctttctgtggtttatgtctcacaaactgtgacctctagtgaccttgttagtcatctattttgccgtctttggacttcatgctagcagatttgctgttccttttttgtaaacattcttggtgacactcctaatgtccataactaatataacatacatataacacaagtgatttaggaagctagcttatagtttatgtgaaagagaaatgaacaagaagccattcataatagaagcagactctgttctacattggttaggatagttctgggacagagtgaaccacagatgccagctctctgctggcagggccagcctagtctctccagggctgagtgggatggtgactgttgcagcccaaaacaaacacacccaggccgggagtctgtcagagcaggaacttgttttattgtagcagtctttcctttatatagggttgaagaaagaggtggggatttttggtgaggtgagatgatgtagagggcggggaaggatgccgtagggtatagggtgactgacagagccaataaagttattctacatcagtggtagctaggcaaaggcaggcttaagcagaaagtgctgagtcactccagtacggaagtgagcaagacaggtctctaaactagagcaaagactcagacttcctcactaggcctcagtatctggcgaataaggcccaacccacagcttataaagcacttcctggtccacagcttgcacatagagagggaggaccagagtggctgtttatagcaaatacggaatgaaaatgcagagtgcagcagaccccagaggagaagggctgtcagcatctgtgagaggcggctccaggttcagattctacaccagtctcctacagatggccctaggaggccgagccagcactgtgtactgccccagcctctcagaaggaatggtgtcttcagcctactctacattttggcctgactatgccgccaggcatgcctacttatcccacacctgaagggggcagcattgccaccaagagaatccctgcctcagccttttcccttgtcctttttctcaggaccattggcagaaacactgcagaatgtatgtttagtcatcctcttgacctgattccccacgtgatcttctgagcacctactgtgtccagtcacccttccctctgcctccctcattcaggctactggacgagtcacttgtctggtgtgatgagctgagagtcccacctttgctccatgctcagcagcagccccaggtccctaacttgcagctgagagcaggggaatccatgtataagtcgggacttgtgtgttaggcccaagcatcaggataggcaaagatctgtctcagtggaaactgctcacctgtagtctggtgctgccggagttcttcnnnnnnnnnnnnnnnnnnnnttgcctcagccttgaaaatattaggattacaagagtgtgctaccattgtcagctctgtctgaggctggggtagagggaggtgcctcaggcaccatttaaggaaatacttatttacataggagcctctgttcccagtggatgtgggatggcagatggccacttagtgcctaatgcttctcctttggaaagccagggtgaaacagtcttactcttatagatttttttgcaagagttaatgctgataagtgccacccagaggcccctgcaggtatccttagccagagctgggaccatggaagtaatttattcctacacctcaaggctacagtcactttttggagttcatctggcttggtgttgctcagacataactaacgttctaataaagaattctctgggttaaagtgctaaccatgctgcttagctctggctgcacatttcagtccccaggggaagcttacagaactattaggcccaggccaccttccagactaattaagttaggctttctagaggcgagacccagactgcacaggtctggtgcccagatgttaatgtcctgccaggtattgggtgatggaagtgcagcaggctgagctgatggtgggcacttctgaggttctgcaggggatgcagaggctgctggtgacatccaggaaggtgaaggtgcttgatatttttatttcagaaccaaatggagagtcaatttgttactgttagtttcttttggaagtgttggcatttttcatttttgcttaagagtttattttcaagtaagctgtaaacaacttaagggatgactttgtttaccgatctgtatgtgaacttaagcctaggcctgctcatgctttgcccgtcaacacggattgcgtgttcacaggttaaaactgcacatgtgttttctgaggtggaattctttttaaggcaggttctttcttcctatatggtctagtctggtctttgattgggacccccctgccttagcttctctagtgctagcatggcaggggtgtgctgtcagactcagctagagcagaattctgtcatctctggctagttgacacttcttaaggaagtttttatttctgtgttttcaaacattaccctgcaattgtaaaagctgtggaccaaccccaaatgggaggaggcccaaatcccatggcccaatgcaatcaatcactgtcttcattgttagtccatcaagtccattttctaagcttagtttttacacctttagttgtgtgttgcaagttatgtgtcatgtgttttatattttcttctgtttctatgcagatttcagatcatgtttaagtagccctcgccccagcaaatgaaggcaagtgtgactgatagtctttacgtgtgaggacagaagagttcctaaagacacccacttgggtacagtctctgctagtgctttagtttttatttggaggggactggcaagatggctcaggtgaaggagctccttgttgagcctggagacctgagtgtaatccctggatctcatgtggtgggggagagtgaacgcccacatggtgtcctctgacctctacacatgcactgtggcacacgagtcttcacacacatgcacacagattattgttgatgaggcatttatgcctttaggttcaaactcactttacaaaatctgatccagtagtgcacagcagctttgaaggaagtcaaccttgtttctctgagtctgtgcacagggggtactatgtctggacacacctttatttatcacgatgtcactttccttcttcctgagttcttacagtgtatcacaagcatacaggcttttctaaagccactcctttattaactgcagcttgattcctagagtacaactgccatggtagaaggtctgagcatttctgaagactcatgatttgtgctacagtttggatggagttttccctggagggggatttgggatcctcagtatggtggtgttgggagaggatgtggagcctcagcggggcctgctgggaggtccctgcctcacagagctgcccctgaagaggttaagggggctttggagagactcccttccagctccatctctcctgacacttgtagcaggaagctaccccagaactgttgacttgctttcagatatgatccccccttttttatttttagatttatttattttatgcatgtgagtatactgtagctgtatagtggttgtcgggaattgaattttttagaacctttgctcgatcttgttgggccgctcccttagaccctgctctctcccgcccaaagatttatttattattatacataagtacactgtagctgtcttcagatcaccagaagagagcatcagatctcattactggtggttgtgagccaccatgtggttgctgggatttgaactcaggacctcagtgctcttacccactaagccatctcaccagcccctaagatatgatttcttaaccaggcaatgcacatctgtaatcctagcaccaggaggctcaggcaggaagattttaaattctaggctagcctgggctatatagtaagtttgatcaaacccgagctatgtggcaagatcccctctgaaaacaacaaaatcaaaaatcaagttgaatggttgaaagcatttgctgtgtcacctcagcactatgttgcagcagtgcaaagcaaattaatacaatctctttgcaatagagtcttactgtagagaacagagcaggctgtgagtgggcctagttcactgtgattgctaaagctgtgtggcatgtcacagtgtttgcagtagtttccagccatgtgatgctgagtctgcatccacttccatgagacagtaggtgactcctgaagcaaagatccttgtgtcacagttctctgtccctctgtgtcttttctgtgtgtaatctcaggagtgggatgccatagtcaaggcatatggttgtagtggaacaagctgtatacctttcttagcgcactaagtaggacatactccggcctgtgctggtactgcctgcttcgcctctgtttcactcctgctcgtgagtcttagaaggtggagtttggtgagattccctctgagaaaggaaggtggagaggccaaacacttgaacattgcctctagatctgaaaatgtgcaagtttcttctcaaacaaaagaggcagtgaggctcaatggtgagggtcagtgtgggctttccaggcacgtctccatggggaacgtggagcatagcgtggcgggaggagggcggaacgccttaggcattgcccaagcaacctcaggcagtagagaaagccacggggtgtttgctgattctaaactgttctcttagattcaggctttgttgagggagtggaattctggagagtgagcaggaagttgtatctgtgtgagcgtctgcctttggaagcatgtgcttacattatgtgtgtgaccatcagaccttagtacccagtgcaggtaggtgttccccacaaaagctgtaccaccgtctaggcagttcatcaagatatgagaagcctacagcaattccaggaggagtgggagagttggatctgaagtgtctctttgcccacacaaaagtgcggaagcaagaagagataaactcactggaaccaggagatacgagccagccctcactaacaggttatgcttgttgtgcacgggggagggaagcttggtcactgttcattagtgtttcattgggatgcctttcctaatgggaagtcgggaagatctagagggtagaattaaacttacagagcagtgtggagggataacagagagcctgaaaaggtgacccattgggagagatattgctgctacggaaactgtgagaacgaggagctggaggtttttgctgttgtccactgggctctgcctctgcccagagagaaggcaacatatgcagcctgcctattcacagaaagtaatttttcaaatctttccagtacagtttggctcacaaggtggtaatttctgtgtcactgacatgaagcctgggtcttaaatatagtcagcatgtgagtgccctgcaggcagtgacagtggcagtatgacatcactgccaagccacttcttgttattttggagccagagtgagcaacaggaagcttggcggaggggagatatttttggccacagcagccatgtggtttaaagagagacaactgtcaggtctagtgctcgggaattttgcagactttgtgtgctgctaagtttgtattcacaggtttgcatgaagtggagcggaggctcagacatactagacttggctctacgctagcagccctcagagggtgcggcctgctttctttggcgcagatggacgtttcttcagatgctttttctttacaagattcaaacttaacctcaccgaatgctcagctccaaggccaaaatcaacttggagggcccagaaaactgcctgcctggctttaaaagtcccagtgagctacttgggaatgacagggtgtgtgtgtgtgtgtgtgtgtgtgtgtgtgtgtgtgtgtgtatgcgtgtgcatctagatggttcagcaggtaaacttgctcatggctaagcctgatgacctgttgaggaaatgctaaggaataacttggggcttgaggtgccctcttttctcctgtgggctttgtaactttctagttcccagagatctgtggcagcatcagctgagagagagggtctagcacttgctgctgtctgtaatttatgaactttacgttcacctcatactgcaaagggaccatagcaatctagtttcttgaaagccctccccatgtgctctatggcacaggcatgnnnnnnnnnnnnnnnnnnnnnnnnnnnnnnnnnnnnnnnnnnnnnnnnnnnnnnnnnnnccatgtgctctatggcacaggcatgtatctctctctctctctctctctctctctctctctctctctcacacacacacacacacacacacatgcacatacaacatataaaataatcagtgtaatttaaaagaaactcacacagggaatgtggtgaatgtctgtaatcccagcgcttaggagactgaggtaggagaattctgacttcaaggccagcctgggctatatagatgagactctgtctcagaaaaccaaggaccgtgaagagtgcttgctccttgtgggaggcagtagtctgcagtgtagagaaactttacctcggaacccagcctcctggattcctagtgagagggaacaaggagttcttccacatgcactgagcacttggacactctcatgaggcaattctcttttccaggttgtctgggaagggcctctgctgtacccatggttttcctcattgtttctttgtctttcagactccacagagcagtgcttcctcccctcattttttatgctgctctttttgttttgtgtggcacttttcatcttgtctgtttctacctttgtgttcacaccctaatctggtcaggggctttgtctcaggcattgggatgcaggaggagtttgttgaatgagttaacatctgaatatgtgtcccttgtgtgttgttctactgtttctggcttacatttcaggtcagttcatggtctaggatagctgctgaattccctgatactgtatctgtcttcaggccaaaggaagagaatcagaggtgggaaatgtgtcccagagctggcattttagctcagtgaaaggtgctgaacgtgaatgaggctctgggttcaaatctcaacagagcaaaaaaagtgcttcttcctcttcctcctccccttcctcctccctcctctctctcctcttcctacctccttttcctcttaaaaatatttacttttattttttgtatattttcttgaatattatacagaaaataaaagtaaatatgtgcaccatgtgagtgcctggtgcccagtaaggcagaagagggcatcagatgctctggaactggagctacagagagttggaaatcactctgtggatgttgggaaccaaacctgagtcctacagtgcagccaatggtcttaaccactgacccatctctctagcaccaagttctttgtgttaaatttaaaaagtattgtgtatgcatgcaggtgtgtgtatacacttgtgtatgtgcatgcatgtatgggtatgcacacaggcacatgtatgtatgtgcgtgcgtgtgtgtgtgtgtgtgtgtgtgtgtgtgtgtgtgtgtgtaagaacacatgtggaggtcagagaccatcttcctggagtcagttatttccatcaaccatgtgatcctggatagcagtcatggttgcatgtgcctggtgatccatttcattgacctgtgtcgtcttttttgaggaggtagcaattctgtatacaggtcttcccttcttagagtcctgagactgactgatggggttactggtttatgagtagagaatgtcagtctaaatgagaaggggattttggtggacagtgatctgcaccctctacaaggcacatagtgaccgctcatgtgaaagttcacttattagggttttagctatgatgtagagctgggaatggtgcttgtttgttctgtgtggaagattgttaccacaatggctgtcagggcttcacagtcagcgttgcgttcacttagtggctttggacaagtgagcttgcctcagtttatttatgtgccaaaacagggtcttgctgtatactccagggaaatgtgtgatcttgtggcttcagcctcccaagtgctcagattacaagtgtgtagtaccatgcccatccttgatgctttacatttacaaaataggtacagcagttagaaagagtgtcacccctggttggaagcgaggtgagacaccaaaggccaggaggctggagcttaatgtgtagttggtaaataggtaatatgtcacccacagtcttcactgctcccttcactcaaggatggtttctaggtgcaaggaaattctcctagaaggccaacaggagcattccagacagataaggacagcctgtgagaaagatagaggcacaaaagaagaggccatgctgaagccataggtagcttctatgactctagcacagaatgctaagtgcatctgggaagtgaggagaggggcatggggacagttccacaggtcctagtgaagggttgggtgtgtgttagtcagctgtgacagacactagagaaaaggaagaagggagatctatcttggctcctggtttcagttttgtcaatggggaatggccccattgctttggatccgagatgggtgagagacagcagaaggctgggtacaaggtataatctttagggccatgtaaagtagcctggcttctctacctagctcttgtctcctggtttccaccccacactgggagtgccatcagattacaactctatatgagaaccagtcagtgactgagcagggcaaagccttcatgctctgctcacttcagaaaagccccagacacacaccaggaacgaagccttcagcaatgagtttttttttttaatttttttaaaagattttttttttaagatttatttatttattatatgtaagtacactgtagctgtcctcagacactccagaagagggcatcagacttcattacggatggtttgtgagccaccatgtggttgctgggatttgaactcgggaccttcgggagagcagtcggtgctcttaaccactgagccatctcgccagccccagcaatgagttttatgaggactttcatatctaaaccgtggtgggatctgggtttgtggacaatgagaatagtaaaggccttcaaggaggcataacagtgttctcatctgatctgagcacaggtctccctctatacattccttgtcctgaatggaaggaagatagtctaagggtggaagtggagatggagtaggagggtgagtgactcccactggagagtcctaactttaaacaggattgaagcattccagaggataggggtagaaccaacagcttaatcctgatttgggttgtgtggctcttgaattaggctctatctccccaaaagatctgttgtctgtgttagatgcctatgatcaagatgtgagtgaagtgtttgtatagggctggaaataaggggccagctcttgcccaggtctgcactggtggcagagtgtatccataggtacctcaggcctttgctacctagggctgtgaagtgtcaggtcttagcacaggagtcagtgctacaacgttagacgcacagaccctgtggcacggtgttatggccaaaatggtggctgatgagtgagcacatcttctgccatagttgttcccttgtaattgctaaggtcacagtgtcaggaggccccaggctgtgaagaagtagctgtttcctgggtcactggctgggcctcagcctgtgatttgtgttaatttgtgtaaattgaggctaatttatcttgattcctttatctacaggaggaattacctgccacataagagatgtgattggaaaggttggatggaggatgctgcagggcagacaatttccctccttactaatgggcatgtgactttggcttctagaggagcgtgacccaggccaagatgacttttcttggctacctagctacttggctcctctccctctccctctccctctccctctccctctccnnnnnnnnnnnnnnnnnnnncctccctctcctctcctctcctctcctctcctctcctctcctctcctctcctctcctctcctctcctctcctctcctctcctctcctctcctctcctctcatctttctctctttctctcttatacctggagagtactggatgcttggtattgaaactagggcctgctctcttctaaggaggtatatccctagcccccagaatttaatattttttcctcctgcttgactttttgttgaggactgtctcaagcacattcagatgagctggccaaccaaacctctgtgaccctgtctgttgtaactgcctttacctaacttgccattgctctgactttgcctgctttttgtttgtttttgtttttttttgggggggggggcagggctagagaaccacattagttatttttgcatttctttagccaaatccctgacagagagcttaaaagcagaaaggcgtatttaggttcggggaattgttgtgtggcagagaggagtggcaaaccagctctgtctgctcagcaaagcctgtggcagcggccaagaagcagagaacaactgggctcgaactttcagaggctgcccctgaaagttcccttccagcatcctggctcttcctcttaaagattccatagctttcccaaaacagcaccaccagctggaaataaaaattcagaacatgagcttgtggggaactctgcaggttcgaacctaaagaacaaccaaagttgttgcctttaaattattggtgatacatgaattttgagacatggtttcattaaatagctctggttgtcctgaaagtcatcatgtagaccaaattgtctttgaactcacagagatgtggctgcctctgcctgctgagtactgggattaaaggtgtgtaccaacaagccttgctgaatgagaaatgttttattatacttatttatttgcaggtgtacatgtcatacgtgcatatgtggtgcatacgtgtatggtggtgcatgcatgtgtggttcatacatgtatggtggtgcatgcatgtgtggtgcaaatgtagagatcagaggataacttcttggaatcagtttttttcttctaccatgtgcaccccaaggctctggctcaggtcatcaggcttggtgacaagtatcctaacctactgagccatcctgctagcacagttacatatgaaaactagtcagggtttaaggaagaccctaatgagtggggtgaaaatggaggccaatggtacagtgctttcttagaatgtttaaggctgtttgctgtcaaggacgacgactttgaaagaggctgctgacttcatctttgaggctggagtgtgttcttcctgagcctcctttgtagctcctctctgctcgctctctgtttccatagtctcctaccctatggcagcgcagcagtcccaaggctccttcctgcgggtcgcattttgctctcagtctttacaatgaacgtttaaatgtggctttgcaattgttttaatgtggtttcatgtagtcaggcagtgtgaccgagagacagacagaaggcgagctgtctgactgttgccgtcttgtcctcctgcctcctcagctttgattggtggccatggcttccttcctccagctaaaagcttgagctgccaggagagctcttactagggaatgttctagcaaagtgtcacacacaattagatataaaaatatttcttatttttgcagattttgacataaataattggagatcccttcttctctgcttccccttataacaattcaaaaagcaccagaattcagtatttttaatagaaaatttgacagtgtgcttactgtataattgctcacaaagggagggaaacccttccacatttgcttctgaggatgaagagagatcttccaggtctgggtggctttgttagagccagctgtcctattccttctgaaatgggaagtggctttctggttcacacaaagtcccaaaacagagcagagttggttctagcagacttttctttacagttgtatcagatatttttctccttgctgaccagggaaacagcaggtgtgctctagtccctgggtttggagggtcccaggcatcatggcagacagggtaagactggatgtgcatggcagcgggtaagtcagggtccaggaagtgtggacagcacctggacctgcccccctttgggcctctgctgccagctagatcctccagctttcaagttcccagcatttctaccttgcaccacaggctggggaaaatgtaatcaaaacaaagagaggccgtggagacctgcagattctaatcatgacagcagcacttactgtggttatagctaacttcatgtcctgtttatctggtttaaaaacaaagcaaccaaaaaagctcctagctagttcctggtcgctatttctttatcctcggggtgtgaacccagagccgagcatgtcccaggcaagcacatggggagctcatgagtgtcgcttgagtgaggcttgtgcccaccctacctcatacgttctctgtgctgcatgccctgccctcagtctctcctagtccagctcctgttgagcccactctccacttccatccctgccctggctgattgcggcttgttgcactatgctaatcagaagcgagaactgaatctctggagggaatgtgtttggttcaaggattgtaatagtgtaattttgtggctgtctgtgcatggaaatacagcttagcctgccactagggggcagctccggctaagagccagaaaatgtgtccctgaaagcacagggatgaggtgaacccaggacatggttattagcaggtgaaggagacctgcctcagccacagacccggacatctgttcgcgtgggtggtcagccccattcctgggcagtgagatgctcattagaaaagccgaggacttgggtggggtggggatgcggggacaggtcggcagcagagtacgtgctgcatacacatgaagtatccacatagaaatctggatatagtacccatctgtaatagagctgagatgcagagacagggggatccctgggactggccagcaagtctggatgcactgatgtactctggactcagtgggagactctgtccctccctgaccccacaaataagaaggaaaaaggacaaaggaaaaaaaaaagaatagaaaagaagaagaataaaaagaaaaaaaaaaaagaaagttgtcaaatggtttagtgggtaaaagtacttactgtacaagccgggcttgcaacattaggaaggttaagaaccactgctccagtctcccctgctggagtattaccagtcctggatcacctatcctggtgactgtgctgtggtgagggggcccctctgtgaggtgacctgcttcattcccatgcaaccctatggtcccattgcctcactttccctccctgtttcttcaggcctccagcgttatcaagaagctcagggaagcaagatgtagcacaggtcctggctgggatccctgtgtgtagggacagcctggctgtctcccatgctagttagagaaagctgccagtctttgaggcaggctgactcaggcctttgtgatcattgactacctgcccaggtgatcagtttcttccagaagtcactctctacctagtccacaaaggagcagagcccgtgcggaggcccctctgggagttagaagtttgcttgtggctttctcaggccccagagctgataatgtgggtaaaacccagaggcctttaagtgttgtggggtggccctctaggtgggctgtgcaggtaaaccctatttcagtctgttctccttacttgggagctagagtggacaggtggggggtgggagagggagagtggacttggtgggtggatggggtgctttgggatagtcagcaggacaggaatccatcactttgtttgtcttctattgactattgtcacttgggtgctaatggcctttagactgccctatttggtgtctgatctcttctgctttgtggagaaagccattaggcaggaagcaaagaggcttcctggtgttttagggcaggaagtaagtagtgcatttataactgacctcacacagcagtgtgaaatcacaggtaggtttaggatgaggacatgagcgggttatactcaggtgctctggtgttgggatggaacctgggaccttatgcatgctaggcaagccctgtacccgagtcacacccccaggtctcccttaacttcttttgctgctgaggagccactgctggccagggctggccaggccttttctgtcaggacagtctgtgttctctcacataaaccctgcctcccttaaattgcctttgtctgttctttagtcacagtgatgagaaaagtaagcagcttaccagacttgctcattgtgtgagctaggaagtgaagatccagggtctgactcctgtcactgactgtatcccttgtctcaaggcttcactgctctctggcctgtatctggtgaagaagcagcagcacccagggctgttctccaaaacgccgtcagtcgtctctggttagctgtatgtgtcctttctccttgttctgagagtaggtcgtgactgtctttcaagagccagctgtaatatcacaccacctctgagaagcctccaggattggccctggtgcttcactctctgggctgagaatggtggtacctgtggtactgctctcagtccgtgttaaatgtgagttctctgatgtacaagtgagagccacctcagtggactgcttgtcctcgtgccagagatgtgacctcccagatgttctgctggagtatttttatgtcccttggtggtactgcagactcctcttaaatgtacactgtgcccagctgtgtgttggctgtgggcagcaaggtggaagaacatggagggaaggcagtgtgtactccctcaccgcctgctgtgtgagcttgggggtctttgtttctgtttccctcatttgtattggggacatagggggaagatgggcctggctttgctgattcctgacactcttgcaattgtgatagtattcttattgttggcttgttatggccttgggatggatagctcctttgcctgtgcactcaagttgctgctggtggagagtggttagagtggagaatgagattcatagcttatgttccgcagggcagctctagaatgaactgcaggtagaggacacctgactaacaaagggcttccttggctcccagcaatggctggcatctacacaggtttgtgagactcccagccaagctaatcctttagcttaatgcccctcccaccatccaggcgtacacagcctgttgagtccttcagggagttggctgagttctgcccctgtcatcctcagagatgggggctcagtgcactgtgtatctgaccacttctcctagcagaggcacaaactgctgctgcccattaatgcccctgtgctgagcagccccctgaggcttgccacgtccttctcaaggctttggcatcaaatgtcttagattaaacttccctgtggaaaagataatactgttagctctgccccacagttacctggctgttgccaggtaggcctgacccactataaaaggggttgcttgccctcttggtctcttgttcctcccttgcccttgcccttgccctgcttcccttcccctttctctcctcattcccttcttcttctctctccacatgctcatggctggcccctactcctcttttctttctttctacctttctatgcctctattaccctcttaactcccgttcccatgccttgaataaactctattctatactttactgggggaggggggatgcnnnnnnnnnnnnnnnnnnnnnnnnnnnnnnnnnnnnnnnnnnnnnaccacatctccatagaacatattccttctctctttatctttttataaacacatcattgtgtggcctgggattctcagccacaagaaagaaactgtctcaaaaggagagagaaaagtctcacctaagggaaagagtcctagaacgaggctcagtgaaagactgaatgtctcccatcctcaaaggcagcacagggctgagctctagaaccctcccctggggccatgtggacatttactctcaccagtaggggcatggggcttaccagttctttgaaattttggctagagagtgtggatctccatgttgtagcaggggtgatgtaaacttacagagtttctaaattccgggttttggcaccaatgatagtagggtagtagaggcagggaaaggcagagagagagaaagagagagggggggaaatatgagaatagaggagtagaggccagccatgagcatgtggagagaggagggaaggggagaggggacagagcaaaacaagaagacaagagagcaagcgaaagaggaggtggcaagcagccccttttatagtgagtcaggcatacctggctgttgccaggtaactgtggagcagagcttaggatgctagcaaatactgcagtatcactgaaagaggtggtaaggccatatgcctttttgtaaatctccaggtgtgggcctgcccgtgaggaggtcagaggaggacctcaggcatattcttctagtccttatttctttaaggtagggtctctgggtcagctaggctgcctggccagtgagttcctggagtcttctgggacctgctgtaccatcttgcaatggctcctaccccaaaattgtctgcatcttactaagtgcctggctgctttgtcattctaggcccagtgcccactgctaccctcagctctgcatgcctgccgagcctggggcttgggctttctgcatggccagctctaccatgccttgctctccttcctgtcagcactcccgttaggtctcactgactcccctctgtgccatctgctttctgctggactgtgactgatgccagcctgctccaacttgatggcttttcgtttaatggttcccctcccgggtgctgtcccccagatcctggcacagctggctccctttcaagcccagcacagatgtcactgcctcagaggtatcttgtcagtctactcttccattttactctggtaccctgccttgctttcttgatagcaactacctgaaatgttcatctatttgacttggcccctgggcttggccagggcatcttgacttaccataggttggcatgccagaggttggcatgtattttctgtgaaaggctagagagtgaattcttccggctatttagaacatatggtctctgtcatgaccactgaagctgtcctagtgagaagacagctacagataatacatcagtgaacaggcccgtctgggcattgctaaaatttggtatacagagaagggtaggggggagtttataataggtaaattaatgtgtgggtatagaagcctggtgctggctcagaagcttctagtctatgatagcacctggctgcaaccgctttgttgactctgggctgagtgctttaaatagtatgtctggtgcaaggtaggtgtgacctgagtgcaaacactcttgatgcctgctctgtgctagtgtctgagctgagcagcaaagtgaaaggagacagtctttctccaggggtcctggagggcaaaagagcctgctcatcatgtacttgttggttctgatggcagatggagaatccagggttggtacgctcttttagacaagttggtcaccagcctttctggggaggcccttaagtgataagactcttgatcatgtggaaaggtggtatagggagagggccttatttatgtctttatttgtgtgtggggattcagagttggtcctcaggtgtcctcctttgttgctctctgacttagtgtgagacagggcctctcagtgaacacaaagccagtgatgtggcagctggccaatgagttccatgaccccctgttctacagtgccaggattacaggcacacatagtcacactgttttcttcttcttgctgagatttagactcaggtcttcctgctgggaggagaggtttctagcaacgtgagagggcagcttgttgaggtgacaggaagaagcttgccagggcaaaggccagatctcctgagcctagacatttgactaatgtcctgtacaagcagaaagccactgagggtgcagaactggaactcacagagtgagaggagcatttcccctgggtgcagcgcggaacacagagaccagaagattggaaggagtcagttctcccaagatctgggggaggggacactagtctagtcagtatggcggacatctgtagagatgccgagtagggatggatgtggatgtacaagcgatgtaataaggatgagtggaagagcagtgggaggggagaggtccaaacggagctgctgaggcctctggagaagtaaatggctcagtgcttagagcacttggctgctctcccagaggatccaggtttgatgcctagcacccacatgctcacaactgtctgcaactccagtttcaggatatctggtgcctcatctaacctctgcagtactacacacagacggtgcacagacatacacacaagcgaaacacccagacacataaacaaacaaagaagcaagcaaataaaagggagaaaacagcaggaaagacaacagaaaggaacccctagaggagtgaattgccacagagcaggacttaaggaggggaaatgagtgggtgtgagagattttgtaagtcacttcttttcttgaatgagtttgtgtggtgtgcctgtgtaggtatgcatgtccctatgcatggacatacacatgcatgaacaggcatgtgcgtgaggcctagaattgatattgggtaccatccttgactgcagggtctcttgctgcacgcagagctcactgagtatgacagtgaagtcagatggcccttgggaccctccgtctctgtgtcctcagtgcttcagcacatgggcagctcccatgccactggctttgctgtttgtgtggggccgatggtcctggcccatgagctccagtcctcgtgcttgctaacattcgaattattcacagagcgtctctccagcctagtggaagtttaaccatgatgtttccctctggcctggcactgttgtgatatttgctactgtttaaaagtgtgttcttttttgactgataacttctcacttggaagtgagctggcatccaaaagctggaggagtggccttagctgtcctatttgagctgacttattttaaccacaggattttctttcaggaagtagagttcacacagaactcatttatccatagcagctcctcccactgctgtttttgagttttccctgccatgatatgaatgaatcaagaactggccatgttcagccttctgcaggatgggtcaggagcgcatagcagaactttgagagacacatgaacttcttgaaatgagtgagtgttaggaaagacttcacaattctacactttcagtttgtcactctggagtgcagacaccccatctgcaaacacccttttcctcaccacagtgtgctttctagtgactaagtgtcacataaagggcctgttagcttgctcagtgactcagtggcatgaagagagaccttgctgtcattgttgtctcaggtcgaaagtacagaggaagacagatgggtgcaggcgggggcccgggcctccagctcctggatgcgcactcagcactcactcagcgacatgcattgtgggagcttaccattccagggctggctttaaccactccaatattaaactaagccttggattctccttcaggggactgtgtcagctaaggccacacactgtcagcatcagaaaacagtatgagtactggatggatcatgtaggaagggtgagtgagctcacacatgacacaggccctgagttctgtttctgtttgtgtggtcagtcctaatgttagcttctcccaacagtgtatatggaggtgtgtagactgagaagggccatgcggctgaacagcgtggattacatcataagtaacatggtcctaggtgaactgtgaaggtgacagtttctgtccttggcctaggatctctgttttcagggatctgaaagtggttatggctgtggtacctggggggcactcctgacatggctcattggcatgtgatgccttaccacatccagaggacctttttactttttccaggaccctgacactaagtctcagcttggctactggctgcagatggcacagtcactgttccacccaggaatgcgaagactgattttcccttgttgtcctgcctcttgagaggactaattccagtgacctgtgactcttccagctggctgtcctgctcagaacaggagtaactgtacagtttttgtctgaattctgccagacacacagatgggtcattcacagagaggtgatggagggtcacctgtctggccatccagactgtccagctgtcctgtcatggagcttctgtgggccatatggaggtctgtgtacctcttgttcctttcttggctcacttctctgcttttgtccttatctgaattggctctgtgactgtgactgccaccaccacctccacctccacctccacctccaccaccacctccacctccacctccacctccacctccacctccacctccaccgccacctccttgtccaccaccaccaccaccaccgacacacctcctccacctcctccacctccacctccacctcctcctcctctacctccacctccacctcctcctcctctacctccacctcctccaccaccttcacctccaccaccttcacctccaccaccgtgacagtatttactacttgttaatagtctggtgttgggaggtgtgttgattctgtcactaccattagcaatgcattttatgctgtggagactcacggttggttatgcagtgcctactgtgtttcagacatttgttcagtccttcccaaagcccagtgaggcatatactggtgccagtatgtttaatacatgagaggactaaaacacaagaaatgaagtcttgttgccagggaagtggctggggttaggtgagccaggagccagggctggcaaactagggccttcagtctgtcaattgatttatttcctcctgagttctctccctcctgttattttgagacagggtttcactatgtgggctgggcagcatggaactgagtataggttagatcaggctagcatggaactcacagagctcacttgctttatctagagagtgctggagttaaaggtgttcagtcccacagccagcacctccttctcttctggtgtgtctgtgtagatcaggctggccttgaacctttgccccgtctcccccgccctttttttttcaagacaatgtttccctggctatcttgtaactcactctgtagactaggctggccacgaactcatagagatctgcttctgcctctgctttctgagtcctgggactaaaggcacgtgctactatgcctggctcctgctttcttttctataaggttttattgcagcacaaacatatgtgttgctttttgactatctgtgatggcagtggcgtgaagtgattggccagggactgtggctcacaaaccacctgcttgcatctggccctcttcccagaagccactgctctctgccgtagcacttgcacagccactgtccagtgttgcctttcaagaaaaggtggtccacgtaccgtgggcacaccacagcacttgggaggctaaagcaggaggataccagtgagttcaaggcaagcctgatctacttcaaaagttttaggacaccctgtgtctcaaaaagaataaaagaaaggaaggatatgtgctcagatatgtgctccagagggagagccgaggttgctacgacaggagaatgcagagaactttagtgcccaagtgcagggcatgtggaagacagagaccaaggaggctgctttgatagaagtggtgtgcaggctgacatgggcctgaggagcacaagtacatgtgcttacgccctaactctggagatgagtgtcttggaaacaaaagaccttattgagaaaccatagattccagctaaagaacgaaccagctccctagaccagcagtgctcgagacctgtgggttgtgatcccttacagccgaaagaccctctcacaggggtcgcctaagaccaccagaaaacacaggcatttacattaagagtcataataggagcaaaacgacagctaggaaatagcaacaaaaatattttcacagctgggggtcaccacaacttgaggaactgattaaaggccgagcattgggaagatcgagaactactgacctagactgtcctacagctaccagcagtggggctggagcacagctggaaaaggccagagccaccataggtgaaaacacttcttctgaacttcaaggagggagctcggccatggctaagaggatcagcatacgtaggggccagcaaaggtgtggggcagaaggaatcttccaagccaaggataccctagttcctgggttggttgggaataagagtctagataatttatatgctatgtgagaagacacggagctgtgtatgtggcaatgagatttcattatgggtttcaacataaagatgtgtttgcatgtgtgtactcacgtgtacatatgtgtacatgaatggaggccagaggaggtgtcaggtgacctgctctgttgctctttgctttactttgagacagtgtttctcacggattctggtggcgggcagctagcaggcccctgtgatcctcctctcttcactcctcagtgctgggacagcactgtgcttggccatacccagcttttgatgtgctggggatttgaactcaggtcctcatgctgtgcagcaagtgttcttattgagtcatgtccccataaacagtattattttggttttgcctgacatcattaactaaatgatctaatctcccttatggctccttttccacctccatttcctggcctttgtactttgttgctgtccagcagccatggatgaactgggtacctgaaagggaggctggaaatgaaaaaggacagagagaatgagagaaggatgaagccaagacaaaggtttctgatcaaggctctaagtttaattatcagctctgcatttatatagggagagcccacagacccatcctttgtttcagctggattgagttgcaaagcaagctcatcttcaactcctcaaagctgcagtaggaagattgcaaatgcagggagaccaggcactgactctagctaggttgtaaaaccactggggatttgtttagcctattcaaggctgggggaaaggcacagtacttaaatttaaaacacgtatgaatttttgtattggtatgacaactccccaccctcattcagggaccattaagtgctgcagagtccccacatccttggcttgacatagttaccgctgtcaatgttgtattcccatggcgtggtaggttgacaggttccctgggtagtgagtggcttggagtcccagccacctcttgctctgtttcctcctcagaggggacttctcagggctgcttcccaccctgcttcatctcagctggtagaactttgtggcaatgacatcttgagttatatttagaggattacgtagtcatctctctgacttcagtggattgctctctagagcttctttaggaagctgagcaaggcacagaagtgacgtggatgctttgactttgatccttgaaccccacccacacagtaccactcattcacgtggaaatgtccctccagaagactgtccctgcaactgaggatggctctgagtgtcaggttgttgctaagaggatggggtttccttttaggcgatgaaaatgacttagacctgatggctgcataactccatgtaggtgcctgtgctgactctggttttgttaagttgacccagggccagctgggaagagggaacgtgagttaagaaaattcctccaacaggctggcctctaggcaattctgtggggcattttcttgatattaatttatgtgggagggcatagcactttcgaggcagtggccctgggtggtgcagcaggctgagccagccatggagaggaagttggcttctgccaggttccttccctcacctgtttcacagtcggactgagggtgaaaaacctttcctcaccaagttgctttttgttatggtgattatcatagcaatagaaaccaaactaaaacaatacaaacaccattgacatttatgattgaaatgggtaatgctcctgtcaacataacgcaatgcctcttttttaaatgacgtagtaatagtttatagtgagctaaacgtgaatgtccgtgaatgtccgtgaatgtccgtaacttggttaccttgcacaacacactccactatgaaagacattacagggcagaagaaaacaggagtcagtgtgcttgcactgtctgtcttgtagaggcatcaggcaggcaggcagaggtcttttcagtgggtttaggtactggcacattcttagcatataaaattggtggaagctggagttccttctggctttctgactatcccaagagtttcatgtagcagttatgaagatcttaggcagtttcatgtagcagttaatgatatatggttattaaatgcagtaaagagcccaggatagctctgcctcctggtctgcaacattcaaactcctccagttaagatatccgggttagccagtgccaaacagtctgcaggctcttttctatacccatagcttcttccaagagcttgaggccacagtcctgggactgttggctaaaatcccttcctggagagttgtgaacaacatctgcccctcctcataaattcctaaccagaaagaagagaacagttccaccatgcctgggaaccagtgagttcatcaggcttctgacagagcaagcatagctgaggcagtactggaaggagagtgggtgacctaaaagtgtctgcaccaagcatgggtggcttccccatggccaccccagagccccctttcttagtcttccccatggtatgtactctacttagcttgtttaccatgcgtatttgggaggaattgaatacaaatgcctggaaggagttgctggctacttagaagagggtccttctgtgatggagccagttatcacatccagctatagaggtctttggcaagcagacctagccatccttctgaggacagcagtgagtctatccaaagacttcgttacagcaacaacacagattacatctccgaaagctgtgaccttaaaacgtcagaagcatccctacagtttagagatgttgtatggtcttgtaactagatcttgatggtacccagtgttagagaaggtgcctgacacagctgtgtgggtgcaaggtagcaccttgagggaggtcaaggcaggaactcaagcaggaacagagacagaaaccagggagcaaagctgcttactggcttgttctccatggctctctttgcttgctttttttgaaacagagtcttactgtgtatccacctgcagtaggttgggccctcccctcccatatcagtcataaatcaagaaaatgccccactatatgcccgcaagacagtctgatagaggccattcttcctagctgtttcttagtttgtatcaagttgacaaagagcacagggagacatgggctgcagtctgcaaactctgatggggctggaaacatggcaagtgttgggttctagcttgaatctgtacctttctcagtctgaatgtagcttctattaaatcttatgtgcacaggaaccagaacctccttgcttctagagaagacagccctttaaccactgtgaggcctgtgaagaggtctcatgtctttgagggtttgggtccctgccattctctggtggtgtcactgcccctctgctgctgctcagagtcaacaaagggcacctgagctcctctctctgctggcaagggcaggctctccttaccctgttctagccttcccatgcttctctgctgacgtggtgccacctccctgactggggttgtcccctaagaggtagccagagcatctcttctgtgctcctgggctgctgaaattatgggatatgcatggtagggagcggcattcccccattgagcgatcccactgtgatgactaacagtggggcctgaagaaggttcttcctggctggatgcaggcctttgagattttcagtcttggcctctgtctagagagaaagaatgaataccacacaggcttgaagtagaagggtttgtccctggattctggccagctctgcagcagtttgaattgcagttgacccaggctgggcttgggagaggaattaccatggacagatagaccatcatgtagaatgtagggggatggaccataaggagtttatttcccacacactaacactgtgggtgctttgtgagtagtaatgtgtaatgaacaggcctggagagagtatgatgtatcgtgtggcccactgggaagcagcacagtactctggtcctcttcaggaaaagcatgttaaagagatttttgtgtctggctcttttttctttggagggaagaaatggattctataaatccaaaatattgttagtactttttaaaatccagttttcttggctctgaggtaaggaggaccagtaaatagcttagcaggctctctctcttgaggggtctagaaagaaatttttttttttccattttttattaggtatttaactcatttacatttccaatgctataccaaaagtcccccaatatccaccccaccccccactcccctgcccacccactccccctttttggccctggtattcccctgtactggggcatataaagtttgcaagtccaatgggcctctctttccagtgatggccgactaggccatcttttgatatatatgcagctagagtcaagagctccggggtactggttagctcataatgttgttccacctatagggttgcagatccctttagcttccttggctactttctctagctcctccattgggagccctatgatccatgccattagctgactgtgagcatccannnnnnnnnnnnnnnnnnnnnnnnnnnnnnnnnnnnnnnnnnnnnnnnnnnnnnnnnnnnnnnnnnnnnnnnnnnnnnnnnnnnnnnnnnnnnnnnnnnnnnnnnnnnnnnnnnnnnnnnnnnnnnnnnnnnnnnnnnnnnnnnnnnnnnnnnnnnnnnnnnnnnnnnnnnnnnnnnnnnnnnnnnnnnnnnnnnnnnnnnnnnnnnnnnnnnnnnnnnnnnnnnnnnnnnnnnnnnnnnnnnnnnnnnnnnnnnnnnnnnnnnnnnnnnnnnnnnnnnnnnnnnnnnnnnnnnnnnnnnnnnnnnnnnnnnnnnnnnnnnnnnnnnnnnnnnnnnnnnnnnnnnnnnnnnnnnnnnnnnnnnnnnnnnnnnnnnnnnnnnnnnnnnnnnnnnnnnnnnnnnnnnnnnnnnnnnnnnnnnnnnnnnnnnnnnnnnnnnnnnnnnnnnnnnnnnnnnnnnnnnnnnnnnnnnnnnnnnnnnnnnnnnnnnnnnnnnnnnnnnnnnnnnnnnnnnnnnnnnnnnnnnnnnnnnnnnnnnnnnnnnnnnnnnnnnnnnnnnnnnnnnnnnnnnnnnnnnnnnnnnnnnnnnnnnnnnnnnnnnnnnnnnnnnnnnnnnnnnnnnnnnnnnnnnnnnnnnnnnnnnnnnnnnnnnnnnnnnnnnnnnnnnnnnnnnnnnnnnnnnnnnnnnnnnnnnnnnnnnnnnnnnnnnnnnnnnnnnnnnnnnnnnnnnnnnnnnnnnnnnnnnnnnnnnnnnnnnnnnnnnnnnnnnnnnnnnnnnnnnnnnnnnnnnnnnnnnnnnnnnnnnnnnnnnnnnnnnnnnnnnnnnnnnnnnnnnnnnnnnnnnnnnnnnnnnnnnnnnnnnnnnnnnnnnnnnnnnnnnnnnnnnnnnnnnnnnnnnnnnnnnnnnnnnnnnnnnnnnnnnnnnnnnnnnnnnnnnnnnnnnnnnnnnnnnnnnnnnnnnnnnnnnnnnnnnnnnnnnnnnnnnnnnnnnnnnnnnnnnnnnnnnnnnnnnnnnnnnnnnnnnnnnnnnnnnnnnnnnnnnnnnnnnnnnnnnnnnnnnnnnnnnnnnnnnnnnnnnnnnnnnnnnnnnnnnnnnnnnnnnnnnnnnnnnnnnnnnnnnnnnnnnnnnnnnnnnnnnnnnnnnnnnnnnnnnnnnnnnnnnnnnnnnnnnnnnnnnnnnnnnnnnnnnnnnnnnnnnnnnnnnnnnnnnnnnnnnnnnnnnnnnnnnnnnnnnnnnnnnnnnnnnnnnnnnnnnnnnnnnnnnnnnnnnnnnnnnnnnnnnnnnnnnnnnnnnnnnnnnnnnnnnnnnnnnnnnnnnnnnnnnnnnnnnnnnnnnnnnnnnnnnnnnnnnnnnnnnnnnnnnnnnnnnnnnnnnnnnnnnnnnnnnnnnnnnnnnnnnnnnnnnnnnnnnnnnnnnnnnnnnnnnnnnnnnnnnnnnnnnnnnnnnnnnnnnnnnnnnnnnnnnnnnnnnnnnnnnnnnnnnnnnnnnnnnnnnnnnnnnnnnnnnnnnnnnnnnnnnnnnnnnnnnnnnnnnnnnnnnnnnnnnnnnnnnnnnnnnnnnnnnnnnnnnnnnnnnnnnnnnnnnnnnnnnnnnnnnnnnnnnnnnnnnnnnnnnnnnnnnnnnnnnnnnnnnnnnnnnnnnnnnnnnnnnnnnnnnnnnnnnnnnnnnnnnnnnnnnnnnnnnnnnnnnnnnnnnnnnnnnnnnnnnnnnnnnnnnnnnnnnnnnnnnnnnnnnnnnnnnnnnnnnnnnnnnnnnnnnnnnnnnnnnnnnnnnnnnnnnnnnnnnnnnnnnnnnnnnnnnnnnnnnnnnnnnnnnnnnnnnnnnnnnnnnnnnnnnnnnnnnnnnnnnnnnnnnnnnnnnnnnnnnnnnnnnnnnnnnnnnnnnnnnnnnnnnnnnnnnnnnnnnnnnnnnnnnnnnnnnnnnnnnnnnnnnnnnnnnnnnnnnnnnnnnnnnnnnnnnnnnnnnnnnnnnnnnnnnnnnnnnnnnnnnnnnnnnnnnnnnnnnnnnnnnnnnnnnnnnnnnnnnnnnnnnnnnnnnnnnnnnnnnnnnnnnnnnnnnnnnnnnnnnnnnnnnnnnnnnnnnnnnnnnnnnnnnnnnnnnnnnnnnnnnnnnnnnnnnnnnnnnnnnnnnnnnnnnnnnnnnnnnnnnnnnnnnnnnnnnnnnnnnnnnnnnnnnnnnnnnnnnnnnnnnnnnnnnnnnnnnnnnnnnnnnnnnnnnnnnnnnnnnnnnnnnnnnnnnnnnnnnnnnnnnnnnnnnnnnnnnnnnnnnnnnnnnnnnnnnnnnnnnnnnnnnnnnnnnnnnnnnnnnnnnnnnnnnnnnnnnnnnnnnnnnnnnnnnnnnnnnnnnnnnnnnnnnnnnnnnnnnnnnnnnnnnnnnnnnnnnnnnnnnnnnnnnnnnnnnnnnnnnnnnnnnnnnnnnnnnnnnnnnnnnnnnnnnnnnnnnnnnnnnnnnnnnnnnnnnnnnnnnnnnnnnnnnnnnnnnnnnnnnnnnnnnnnnnnnnnnnnnnnnnnnnnnnnnnnnnnnnnnnnnnnnnnnnnnnnnnnnnnnnnnnnnnnnnnnnnnnnnnnnnnnnnnnnnnnnnnnnnnnnnnnnnnnnnnnnnnnnnnnnnnnnnnnnnnnnnnnnnnnnnnnnnnnnnnnnnnnnnnnnnnnnnnnnnnnnnnnnnnnnnnnnnnnnnnnnnnnnnnnnnnnnnnnnnnnnnnnnnnnnnnnnnnnnnnnnnnnnnnnnnnnnnnnnnnnnnnnnnnnnnnnnnnnnnnnnnnnnnnnnnnnnnnnnnnnnnnnnnnnnnnnnnnnnnnnnnnnnnnnnnnnnnnnnnnnnnnnnnnnnnnnnnnnnnnnnnnnnnnnnnnnnnnnnnnnnnnnnnnnnnnnnnnnnnnnnnnnnnnnnnnnnnnnnnnnnnnnnnnnnnnnnnnnnnnnnnnnnnnnnnnnnnnnnnnnnnnnnnnnnnnnnnnnnnnnnnnnnnnnnnnnnnnnnnnnnnnnnnnnnnnnnnnnnnnnnnnnnnnnnnnnnnnnnnnnnnnnnnnnnnnnnnnnnnnnnnnnnnnnnnnnnnnnnnnnnnnnnnnnnnnnnnnnnnnnnnnnnnnnnnnnnnnnnnnnnnnnnnnnnnnnnnnnnnnnnnnnnnnnnnnnnnnnnnnnnnnnnnnnnnnnnnnnnnnnnnnnnnnnnnnnnnnnnnnnnnnnnnnnnnnnnnnnnnnnnnnnnnnnnnnnnnnnnnnnnnnnnnnnnnnnnnnnnnnnnnnnnnnnnnnnnnnnnnnnnnnnnnnnnnnnnnnnnnnnnnnnnnnnnnnnnnnnnnnnnnnnnnnnnnnnnnnnnnnnnnnnnnnnnnnnnnnnnnnnnnnnnnnnnnnnnnnnnnnnnnnnnnnnnnnnnnnnnnnnnnnnnnnnnnnnnnnnnnnnnnnnnnnnnnnnnnnnnnnnnnnnnnnnnnnnnnnnnnnnnnnnnnnnnnnnnnnnnnnnnnnnnnnnnnnnnnnnnnnnnnnnnnnnnnnnnnnnnnnnnnnnnnnnnnnnnnnnnnnnnnnnnnnnnnnnnnnnnnnnnnnnnnnnnnnnnnnnnnnnnnnnnnnnnnnnnnnnnnnnnnnnnnnnnnnnnnnnnnnnnnnnnnnnnnnnnnnnnnnnnnnnnnnnnnnnnnnnnnnnnnnnnnnnnnnnnnnnnnnnnnnnnnnnnnnnnnnnnnnnnnnnnnnnnnnnnnnnnnnnnnnnnnnnnnnnnnnnnnnnnnnnnnnnnnnnnnnnnnnnnnnnnnnnnnnnnnnnnnnnnnnnnnnnnnnnnnnnnnnnnnnnnnnnnnnnnnnnnnnnnnnnnnnnnnnnnnnnnnnnnnnnnnnnnnnnnnnnnnnnnnnnnnnnnnnnnnnnnnnnnnnnnnnnnnnnnnnnnnnnnnnnnnnnnnnnnnnnnnnnnnnnnnnnnnnnnnnnnnnnnnnnnnnnnnnnnnnnnnnnnnnnnnnnnnnnnnnnnnnnnnnnnnnnnnnnnnnnnnnnnnnnnnnnnnnnnnnnnnnnnnnnnnnnnnnnnnnnnnnnnnnnnnnnnnnnnnnnnnnnnnnnnnnnnnnnnnnnnnnnnnnnnnnnnnnnnnnnnnnnnnnnnnnnnnnnnnnnnnnnnnnnnnnnnnnnnnnnnnnnnnnnnnnnnnnnnnnnnnnnnnnnnnnnnnnnnnnnnnnnnnnnnnnnnnnnnnnnnnnnnnnnnnnnnnnnnnnnnnnnnnnnnnnnnnnnnnnnnnnnnnnnnnnnnnnnnnnnnnnnnnnnnnnnnnnnnnnnnnnnnnnnnnnnnnnnnnnnnnnnnnnnnnnnnnnnnnnnnnnnnnnnnnnnnnnnnnnnnnnnnnnnnnnnnnnnnnnnnnnnnnnnnnnnnnnnnnnnnnnnnnnnnnnnnnnnnnnnnnnnnnnnnnnnnnnnnnnnnnnnnnnnnnnnnnnnnnnnnnnnnnnnnnnnnnnnnnnnnnnnnnnnnnnnnnnnnnnnnnnnnnnnnnnnnnnnnnnnnnnnnnnnnnnnnnnnnnnnnnnnnnnnnnnnnnnnnnnnnnnnnnnnnnnnnnnnnnnnnnnnnnnnnnnnnnnnnnnnnnnnnnnnnnnnnnnnnnnnnnnnnnnnnnnnnnnnnnnnnnnnnnnnnnnnnnnnnnnnnnnnnnnnnnnnnnnnnnnnnnnnnnnnnnnnnnnnnnnnnnnnnnnnnnnnnnnnnnnnnnnnnnnnnnnnnnnnnnnnnnnnnnnnnnnnnnnnnnnnnnnnnnnnnnnnnnnnnnnnnnnnnnnnnnnnnnnnnnnnnnnnnnnnnnnnnnnnnnnnnnnnnnnnnnnnnnnnnnnnnnnnnnnnnnnnnnnnnnnnnnnnnnnnnnnnnnnnnnnnnnnnnnnnnnnnnnnnnnnnnnnnnnnnnnnnnnnnnnnnnnnnnnnnnnnnnnnnnnnnnnnnnnnnnnnnnnnnnnnnnnnnnnnnnnnnnnnnnnnnnnnnnnnnnnnnnnnnnnnnnnnnnnnnnnnnnnnnnnnnnnnnnnnnnnnnnnnnnnnnnnnnnnnnnnnnnnnnnnnnnnnnnnnnnnnnnnnnnnnnnnnnnnnnnnnnnnnnnnnnnnnnnnnnnnnnnnnnnnnnnnnnnnnnnnnnnnnnnnnnnnnnnnnnnnnnnnnnnnnnnnnnnnnnnnnnnnnnnnnnnnnnnnnnnnnnnnnnnnnnnnnnnnnnnnnnnnnnnnnnnnnnnnnnnnnnnnnnnnnnnnnnnnnnnnnnnnnnnnnnnnnnnnnnnnnnnnnnnnnnnnnnnnnnnnnnnnnnnnnnnnnnnnnnnnnnnnnnnnnnnnnnnnnnnnnnnnnnnnnnnnnnnnnnnnnnnnnnnnnnnnnnnnnnnnnnnnnnnnnnnnnnnnnnnnnnnnnnnnnnnnnnnnnnnnnnnnnnnnnnnnnnnnnnnnnnnnnnnnnnnnnnnnnnnnnnnnnnnnnnnnnnnnnnnnnnnnnnnnnnnnnnnnnnnnnnnnnnnnnnnnnnnnnnnnnnnnnnnnnnnnnnnnnnnnnnnnnnnnnntggggtgggagtgctgcgttctgatgatggtgaagtggtcttgatttcctgttagtaggattcttacgtttgcctttcgccatctggtaatctctgaagctagctgttttagttgtcactgttaagagcttgttcttcaggtgactctgttagcctctatgagcagacctggagggtagcactctccttagtttcagtgggcagagtattctctgcaggcaagctctcttcttgcaaggcaggtacccagatatctggtgttcgaaccagactcctggcagaagttgtgttccactcactagaggtcttaggatcacgtgtggaatcctgtgtgggcccttgcgggtgtcaggcgactcagctggcaaggtagccggggctcgagtggagtggaaggggtttgtgccccagatcaagcccgggtagcctgcttccctatgtaccgcagtctcaagttccacgcgattggattggggtaggcgctgtgttccactcaccagaggtcttagggtcccgtggggagtcccgtgtgggcccttgcgggtgttgggcaagactctgctgtcaaggtagcccggggatcgagtctcgagtcgagcggaagggacttgtgccccagatcaggcccgggtagcctgcttccctatgtaccacagtctcaagttccgcgcgattggattggggcaggcactgtgatccactcaccagaggtcttagggtcccgtggggagtcccgtgtggacccttgcgggtgttgggcaagactctgctggcaaggtagcccggggctcgagtctcgagtcgagcggaagggacttgtgccccagatcaggcccgggtagcctgcttccctatgtaccgcagtctcaagttccgcgcgattggattggggcaggcactgtgatccactcaccagaggtcttagggtcccgtggggagtcccgtgtggacccttgcgggtgttgggcaagactctgctggcaaggtagcccggggctcgagtctcgagtcgagcagaagggctagaaagaaattttaattacttttcacttagtgctttcataacttctaaaaggagcctggtttgggaatattatttggtagttcctctgtttgtgggtaccagggccatctgcattatctctgtactgttactaggttgctatttcctctcttgtaagtctatagcaggcattggcctctgctggaagttggtcattgttatgaactgaattctgccccctatattcatatgctgaagctccacttcccagtgtaaatatgttcggacccaggacccttaatgagataaacaaagttaattgaggccataaaaacaggtgtcttaatcagggtttctattcctgcacaaacatcatgaccaagaagcaagttggggaggaaagggtttattcggcttacacttccacattgctgttcatcaccaaggaagtcaggactggaactcaagcaggtcaggaagctggagctgatgcagaggccatggagggatgttctttactggcttgcttcctctggcttgctcagcctgctctcttatagaaccaagactaccagcccagaaatggtcccactcacaaggggcctttcccccttgctcactaattgagaaaatgccttacagctggatctcatagaggcatttcctcaactgaagctccttcctctgtgataactccagctgtgtcaagttgacacaaaactagccagtacaacaggggactcttatccattgaactgtccttacataaataggaagagatgccaaggactcatacccagagagggtcccagggggacacaattaaaagattgctgtttttaaaacaaaattccaaatgttcaatttggaatgaagactcaggagctagatgctggggtgaaagcctgctagctcagagaagcagagaaagcacccagctgcccttcctactccaccaatgtcccagaaggaaaagctcctgctcctttgtcatctgtcttaaatgcccttcaactcaatgtccctcctttctcctccctgggtttccctgtgttcaatctctgtcaactggttgcttgccccacctcttgacctatggttaatctcatttacagaaaattcttgtgttaaaggtgtgagctaagggtgagccacaccacatccagatgtagcagcctgaggccacaggaactgggttcctgagtgggaggccagagctgtaaaagagggaagggcaagagaagaaaagagaccaagacagattgctgatcaaggccccatgtttaccagcagtctgtgcttgtaaagagggaaagcccatctcctgccaagccaggcttcttgatgctttgttgctaagttgttaacactagtctgtcagagctgttagcattaggtcgccaaatctacaggttgtcagctatctcaggaatatctcaggaagacaggtttagcctctcagcagcctcttggagcagagcagtggcaggtgacagaatagaactatctaggtctgaaggctccaccccaggtggtctcattctcagtggcagcaaggtctgaatcagcctgctcaaggctgggggaggctacaacaagaaacaggttttccccattcacaatcgtggggttcacaatgtgatcaaatatcctacaacagaagatgaaagtctgtaagtcaaagagagaggttgcaggaggacttttgaatcttggatttccagttttaagatctgtgttttgttacagcagtgcaactggactgatagctcataggtttttattgggtttaagtccaaagcctgaatcttgggataagccataaacttcctatgccctgatatccttttctgcagtacagggtgtgagtatgtcccaggagttttatatataatatatatcatacgtaatatcattttctatacactaatacacacattgttttagttttaaccatgacaggggattgaccacattgggtctagatctcaagtgttgatgctcagggtctgtgaccaaggcagtagttggtggggaacgtctgctgactttaggatagactgtgtggggattcatctcagttttggttcttttgggtgtggccattgccggcagctagatgatgacagcacagtttagttgtgagtggagctaggctgggtggctagtgtttttgtagatgacacttctatctgtggttggatcctttctctctctgcttctaggcatgattgtcctgtgctctttctcctctgttgtgggtctgtgttgggcaggatcttacatagagacatccatctcaggagcagccttcactggtcttgttctgtttcatccctaacagcctgccttattttggttcctgggaggtagtggtgtacagtcattgtcattttatagacagctttaccaagatgagatctgcctatgttacaaatcagccatctaccatgaggtcaatattttaaatcacatttgtggtgctaatgcttgattttttttctccctttccttcctccccaccattcttctttcgttttttcctggggtggaacccacagtcttgcccatgctagtgaatgctataccatgctgggccacaactctttttcagccatttttcatttagcagtattttctaacttctgtacactcagtttgtcatggtatgacgagcgtctatcatcagaaacctggaatcatggcgggacagcattggtataagcatgtcggccctcattgtcaggacagcactgtgtggccaaccttggtcttcctttctcggtcagctgttttctagctactgagcagagcctcccagtgattatcaagtgtgtgttccaggcttcatctccccaccatcatgggaactgctgactatattagttccttttccttgttgctgtgccaaaactcctgacacaagcaagtataggaaggagggcttgtttcttggatgtaactacagtggctgctgatctatgtggacaccatgttatcaaagtttgtaaattcagtctaacttgaatggtgctttcttctcactgtagagtttgtttgcaaactgtgctaaaaatgcatttggctggatagacacactaactttctaagttcttgctgcaacttgagtgttattgttctgaggactcctgtgtgtatggtttaaagcaaatgagttgataagttatgttgttatgatatcatcctgtgagtccttgtataaggggaacagaatatgcaaatgcaatataaaaggttgggctggtgaggtggcttggtgggcgaaggcacttgcacagtataagtggctaagcaaacaaccttatcgccctgaatttggtattctgaatcccaaaccatcggatattttaagtaggggttcccatgtgtatatatattcctgtgcatgcatatctatacagtctcagaaaaacagtctcaaacttgctactaacatgttaatgagtgcctagaggtgccagtccttctcacctcaatccaggtgccatcaccagagcacacagccagtgtgtgtgtctctactgccagcgcagagtgcacagtcgcccgggtctgcaggtttactctctggtcgcatcactcactgccacacgtgtgaggcttttgctcctttccagctcattctgggtctgcaggggaggccagcagcagcctcaggcagcagcactgagcagagggctctgctgatttccagtctttagatcccattttcttgtatctgaagagccaggacattcatttgaagtgttgctgtcagaggaggttaatctaactctccttcctcagagggcacttggcccagaattgttctctctctgaggcaggtgattttcttagaatagatcttgatgttgtccctcatagtcaatattcttaggttttgcctgggctctggggcaggtagtttgaactgtttgcatcctgtggggcggccactcctattgtcctctcggccgggcgcctgtctctgtgtggtaggtcttccttgcctgtcctgagcatttgctactttcttaagtcattgaatcacttccttcgcaccttgctcagtggagactgctcccatgcctgtgccttcctggtgaccctttcctgctgcttctcatttcccgagtgcttttctgggctcctatgttcttcctcagtgttgcactttctaattgtggtatgctctgttcttccatggcttgcatcatctgtaccttgtcttttggcatgtcttgaaatagaagcttgcagttacatgggtatacttggtatatttttattacctgtagatgatcttccctccttcttctcttccttcttcccttcctcaccctttcttcctccatctcttctcattttaagtcagagtcttgctatgttagcccaggttagcctgggtctaaccattgtagtccagcccagccttgaacctactatcttcctgccttggccctctgagcgttggtatgccaggcacaaggaccgcaggtaggggaccagagctctgtcttctatcatctccaggaacacaatcatttgtttcttggacccactgagctttgcccttctccccctttcgtccttcgcacccgtcttcctgttcagttactcctccatctcagtggtctttttcttactctggggctctatgaccacagaagggagccacggtcagccgggggttctggtcagtctgcacgccgctgctgtttgagaggaaggcctgtggttccaaagcagcccttaccttgtgctgatttggggatctctcagggcttttcaagtgcttgcccttttaatccatctgtactggtgctacttaggcctatggctgttaatctgccttggcacaattaaactggagggtttgcatgggggccctgcctctagtcccactgtaaatatcattagtgggctttggtcttatgtgtttatttgtttgtttatttaaagacattttacttttattagggaggttgttttttagataacagcttgacagaagggtgaggagactccgtaatggggcagtgaggcaggagcttaaactttgttctgttgggggaactgtcctcaggaccttgcaggaggctagaactgaacataattacaggggtggtagaggaggaggaatggagactctttgaggagaggagactgttgtgtgtgtgtggaatgacaccctcagtctttcaggggaagccctggggtttgcagtgcttcaggagcaggttctccagacacaggtcctggtgtgggatcccgtgtgccttcaggttctcaggttagctgcagagctgcagaagcaggaagcacagccggtgctcataaacctcaggctctgccggaggcctagcatagattcccgaacagttggaggctggctggtgaggcacctcccaggtgatgagcaccacaccatctgtcacactcctcggcagcgggtgcagcagcacaaggccctggctggatatgtcagggctggtaagcactctggaggccacagaggccacaacataccttctgccttgccggatgtttggaatgcatgggcgcacaccacagaccagctgcagtacaagattgatttgggttctagggttttgcagattttcatagccaaagtattggcagtggtctcagagtaggtggtgtagtaccaaattggattccccaagtcacaacaaggctcactgcatgtcagcttgaagagtgatcacttcttctccttgaagctcagttcctttttctggccacccatgaagaggtcttcacacttggtcactaggtgggccaaggactgtgtgtaaaggcccccagggactgtgtgtagagacccccaggcactgtgtatagaggcccccaagcttggcataagtgccctctttgctgctgatgttactcaacagattgtgcagctgacgctgggtgctgccattggaggcctggctgatgctctgagctggaaagacaacatggaggtggcgctctgcactggagactggggctcccacagccgcttctgctgcttgccagccccagatctagagcctaggaggcaccgactttgaaagctttctccaaaggctcagaagagaagacatggtgggaagctaaaaggaggcttgccatgggcacaaacactggtttctgagtggcgtaggttcagcctgggacttgctgtccatggcttaggggaaccatgggtcctgaagaagccatcaggggaagaggccgcacagctcactatcttttactggggcagaggaggaggctacgcaggaccactgggggatacattctttatggagcctgatgggaaaggagggagcgaagagtttttcctgttgatttgtgggtaagttggtgagttcatgtatggacctccattgctgcaggtcctggagtccatagctagctgacagtggggcctgtggtgaagctgatgtgagcccttttgaaggctgggctctactttctgtagagctctggctcactttttccaagtcagagctggtcttgttcatttttaacaggtaccttgattttggaggtagggaggaagtgaggatgcctccatcctacctgtgtccttcaggaactcataggcggaggaagcagattcgcttatcccagcattagttttgctgttctgcccagaggagtttgatgatgagtgagatggagaaggagctgggggaggagtttgaatgggccacatatcagttccaccttcccccccccccccccgctttgactcgacagtttctcttccccttcctcttcctctatccagcacaggtggccccagtcaccagtctgttatcttagctgccgctggtccaaggctgaagaggagatggttggtggggtacacttgtcagggtcacaggcggcaacaccactgatctggcaggatgttagatcagtagggactatacacgtacctggtttccattgctgctgctaccggtgttccagtcgttgtcttaagctccactgtagacgccatctgtgggatttgctttactcctttatttattttaatgtaggaaatttaaagagatttaaaaatgctgctgctgtcactgcaatcttcccagaatccttttctaaataggcattttaaatattcctactaaatcctcccttaatattaatcccactggacaaagcacgatgcagggaacctgccagcgggggaactggaaggcaagcaggcagctgggagtgggccagttgatgattgaggattagagctcactgtgctgcttagaaggcaggtctgcaggctgcccagagctgccattcagccagggcctgtgggtggcacctttgtgtgtatgtgtggggttgggggagacaagagtggctccttaagccttggggcaggagtgatattccggagccctgcatacccccaacctgggcaggttctcctgctcactttcagtgctacagagaaatgtcatcatgaattttgcatgcagatttttcttcataaaacaacatgttaagatttccttaactttttactttggagactttaagttgacacttaagtttaccagatcttcaggtttgagtctgacattcccctgtaagctcttatcagggatgctttgtccccagcaggtggtgagtgacagtttggagggttatggggcatctaggaggtggggtgtggctgatgtgggtggtcatgcagggtgttcatttgaaggttttgcttactactgtctttaccttgctctctactttctggcctaccttgtgagcagcatccactacatgttcctgccaaagtgaacctcaccatgcatcatccaccatagtggactaaaattcccttaaactgggaaccaatcggagccaaaactagctgtccctccattaggcgcttctggcaggtggtgttgtcatgacacaaaggttaccagtgctggcggtgttgatattacacatttgacttttattttcactcttcttttctgtatagacacactcaggtacacacatctcacaatgtggatgtttggaagggttttcccacatcatcctagtttgctttctattgctcaaccaaaatcaccttggggaagaaagggtttgtttcagctgacagcacattccattataaaaagaagtcagggggacagggcaggaacctgcaggcaggaactgacacagaagtcattgtagtatcatacttcctggcttactccatgccttacttagcctgttttcttacacaactcaagaccacccaccaggggtgcccacagtgatctggtcccttccacatcaatcattaattgagaaaatgcccctgctgacttgcctacaggctacctgttggaggcattttctcattaaagttccttttttacaaatgaccctggcttgtgttaacaaacaagttgacaaaaagactaaacacacattgccattcttgctccctaaccctgtcagcatcgatctctgagaacaagggtgttcttctgcattacgaagatatcattgcatgcctgagataaccgacagcaaggctgtctttcaacagtcacaataccctaagtgttcctaatgtgccttgtatggtgatttctcattcaggagctggacaaggtttatacattgcccttggctgggctgccttgagacttccgcctgagctcctttagggcactgtgctttgtggtggcaatgcagggttggaagagcctacattcttgcttttaaaaaggtcatggccaggaggcaggaatgttgtgatttaatattaaggagtcagaattcatggggccctctgtaggcagccttatttcagactttcattttgcttttctaacagatgccacccaatctcctgggctgtacactcactgtgcccagatggcttctaggcatcctttccatcccaggcatgtctgaagcccatggtgctagctctctttatgctggacccctggagtccagaagcttgcatcacgctgttgaggagcatctagcatactttcccaataatttgtcttcaacttcaggggttaaagggaacatagcagaaagaggctctaattacgtgccaactaacattaatgacaaacagctgaaggagtctggttttattttgctgtgtcaattcttgcagtcattagatgtcaagggaaaaataattgttccttagaaatgtggttcacttggatagatccctggggctgactttgctgcagtagcaatgagtatatctgagttgccatgctgtggtggctgagaccattagcatgaacctgtactccaggttctgtggtgacctacttttgtaccaagcccttgctttagtcctgaaattctgagcccaaggctgtttgtggagcttgtcatactgcagagtttctgcacagtagaggtcccagactggaatgcccacagacaaagctcagggaagtgaggaatgtgcctcctgagagatgaagaaggctgtctttggaggaggaactaggggaggcactttccctgtctacaggggcagcagctcctcttcagtgagccagctcatagcaagacctcccaggcagctctggctcgtggctttttcagaacaaacctacatctttaagtgaagtagccttgcatcgtttgcacctagatggaaactccttgccccctctgaggcttacgtcagcctgagaaccttcggtccatgattccagcctatgcgctgtaataatatgttctcttcagtcgaatttctgtgtctgctgtgtggcctccattgttgcaccttgttgttgttgttgttatcatttaaaaattattcctttattcacagtctagtctcctgcctgtggtctcaagaggcagagatttgatgagactattaagattcattccaaagccaaattgagttttcagcttggtgttcagatagtgtgttcagataccctgccaacacatgtgaacactgacagtgtgcatgccctgccttcaggcccgttctgccttcctcaagagcagggtgcaagataagaagagcaatctgacctcccagttgccatctagtggtttctagtttctgatagaagtacagtgatattgtcaaagtgggacgtgtagcttaggatctggctcttatttatttatttatttatttttctgaagccacttaaagtttaccatgctgtccttattcttgccaagcaagcattctttttagtttgttatgagacatttaattcatcttcatgttcttctgtttaaaccattattataaatccccctttgaggagcgtgcgatggtggtgagggtgctgtttctttcctgaggggattgtgcttgtgtgcacttcagtgtgtgtgagtgtggaagccagagcttaatatcaggtgtcttccgcagttgttctctgtacactaaatcttttccagcttgctttagtaactgtcaacctctcctcgtgcccatcactcaccagaggcagtgaaagagaaacgttattagatatgggggaagcgaccctgtttagcaatagctctttgggaatgagctcaatgttctttgtcatcaaatcaatcccatagcaaaccccaaatatgagtcagcagctccaatccagtcttcttagcaggcagacaccacatgtgaaccagcatctgctccagtactgaagagaccgcaaggctcaccaactgcctcaggctgctgaggctgccagaagcctctcaatggcagtgttgccacaagctgagcttaacaaagctgtgtaaggtgaaccaatacaagcttgtcattagagaaggatagtgaggcagggcaaagcaaaccagtgctccagttcccactgtctgtggggtcatatttatagtcttccatcacttgtcctttcacatgtctgctccagcaaagcatcatttcagctgtgtctgcttcaggaaaactttcacgtgactgcttcaacaagacctcctttcacctgtgtgctccagcaaaaacgtcatttgacaaaactgactttacaaagaaaccagaagttaagtttccacttcaattctctacttttttttttttttttttttttttttaagcagggtctctcactgagcaaggaactcattgatttgggtggacttgctggacagcaaactccagggattctcctgtctctgccccacccccatcccacccccatctctgggatttcagtgcttgctgccatacctagctctttatttgggttctgaagaatgaactcaggtctttatgcttatgttgccagcttttataaaccaagacatcttctgagccaagggatatttttagctttatattatgaagcaatttaagatttgtaaaataatcataaagataataaaataactcccatacgttttgtctgggtcactagttgctaatagtattttatagtaattgggacatatttatctgtgtgtcttatttacccacataagcgtttgtagtatatatagttaagttaaaagcaagcatcatgatgttttttccttaaacactcttcagacacgggtgctttcttacacggctgcagtgtggcaggaagggagtgctgtgcagtaccatcatgactgcagaatgggtgtgacacacaggaagtgagcattctcacatgttaagacagcaaacccaggtttgaaggccttgcactgggcactgcatgagaaatgtgaacttgtcagagcagggctgagttcatgtagtcttacgctgtaatgaatggccctctggatagggtgtattctcttacaccatggctctggcctctgtaggctgtagctttgaaactatttttgggtggaatgtcatttgcatatctcttctctagtttacatctctagctagcagaattactgtttttagcaaaggtaggttactacatagatgtagtagtttctagaactggatcctaagaaaaccctgttcagcatgaagctcctgcttcccccagctaatcggataaagctaattccctagatgcaggaacctgggccagcctcaggaaaggtgacatgtgctttctgaggacatatgtaggatgtatctggggaagagggttcagtgctcaggatactctgcggtgtgtcatcttctattaattacctttgtgagttactggagctgtttgtctatttccttggctgggatctggaatgcctacattcctggcatgccattctaaatagaatttatcaggtggctaatgaggtatgatgggttttatagaaggaatagggagatggtgaggaaaaggagagaaggcattaaaatccacccacactttcttaggtgctccccccaccccccagccctccaacaggagacaatactgcacaggtcagtcacagagcagagaaatccgaggctccggggagctctgcaatgttgtcttacttgagggaactggaaaggaaagaaaatgtcccaagacttcttatgtctgagcaggcactatcttcatgttctgggcggcagttgaagaagaacaccgctcctgctgggtgtctgtcaccagcatagtatatatgacaagagggctcatggcagtgaatggatgccagagtgtggctaagaagtgtcctggtggtttgttaaagttcagacttcaggttctactccagcaaatgtgattccaagagaggcctggaacctgctttcttcttctagcttctacccctttataaactaacatgggtgccgcagactctctgggtccctgtgtctgcgtggaatggggtctctcgacgcgggtgggcaaagcgtggatgaatgacagacagacacacacacaggagagtttgtgtggaatctgaatgtaatttttcaaatcaagcatcagactttttatgcagaagacaacaaggtagttgggtgacatacccacaaggtacaaatgaggtaaccggatgcttaatgactcttacacagaacagaggaaatgaaaacgcaaagactggcaggaactgggcaataaaataactgagacagagtcagccctatctaaggtcagctatagtcttaggagccaggtgtgagaacttttcactcctagggcaagggctttcacacccaagtcatggttctaactagggagttcccttctagctaaccatctcatgaataatgcaatactctaaaaccacagccggatctacttcctaaaccattgtaaattcctgtatataggtgtaactcagctataattctaaatatctattctggtttctcctacggtcagaaacttctttcttccttagtgatggtaaattcctgtgaagggcatgacctaacttttactcaaagagatagtgtaataccaggggcagtactgaattccaagcccaaggtcttgctaaggacgaactaggactgttggaacactggcggacggctttagctatgtcagaattcaatcttaaaaggcacttatgataggaaaatattgaaagagagcacgtggatccatacactagactaactcgggaatggaacgcggaaatgaaaaattactgtatgggtagggaacgctagactccaggaggagagcttccttgaaactcttttgcctcatgagtgacttttaagcctctcggcttgtccagttgactcgaccagagagcgtggcacatgggtttcctgtaagtgatgccttctccttgggcactgcagtaaggtgctgagggtcagaagtcagcactcctcacactgcagtgcagtgtagtgcatggcactcaccatctgtcatagagccctcctgtctgcagagtgatggacgccagagtgaccgatgcagctaccatctctcctcagctttctttcacgcttatgactctgacatttttaaaaatggcaaccagtttactttgtaaaactatttcaatggtcgaatgtcccatccttgccccgtgagggcattactatgttcttctgtgacagtctcatgagttcacaacaatctcttgaattttgacaataactttcttgagtagcaagagtctggccccaactgtgtgataaacttggttacttttttaaatttaaattttttttgagacagttttttctgtgtagctatggcagaactggagctcgctctagatcaggctgtcctcgaactcaagataatctcttgtgctaggaatagcagcttgtgctgccactactacttagcaaaatttggttatttgatcagttctcctttaagtaattcacctctcctggccttggagccgtccaggaagggaaggcccccacccccatcacacccctcacaggagttggaggagttgagctgctgagattcaacaatcccaggtccgttcttgggtgtctttgaccagttatcacccgtgctgagaatgtcctgagatgatgcctgtgagcctcataggtgtttgacaaggtgttgagttgcagacagaaaaccatgtaagccatagtaatggcacaggtgtcagaaggcaaggcatagggagggactgtgatgagctaaatgattctacactggtggagaggcttagttagatgtttggctgagcatccctggcagccacaaggcagggaatgtgggggtccagcctggagagcacattaatggaggagttgaggtactagtgtgagtagagcatcttctgcctttatctgctgccatgctgaacttttatctgagatggaagctggctgggaaaccgtgaccctcttaggattgttcactgtattacaaaggcaatgtggagggctggttccctcgtctggagtcatactgccagtttgaatcccagttcttgtcatttcctaggaaaactgcttaggctctctttgtcccttaagcctgtaagtattgacaaagcctcgacagcccttctcctgcagcagcccttgcttattataggctctgggttgtcacagaactgtacaaaggtgcttttggttgattccagggttagaaggccttcacaagggggtaggtctggaggagactagcagtatatgatggaagcagcagtatatgatggaagctttgatagcatagtttacagagatcttgagctgctaggactaactttcagcaccattaaaccttttgttcctgctgatatatccaaagatgggaggagaaagattactgggccaaattaactaaagtaagcaattaattaaagcaagcttttttattcatgtacatgggctaaggcagggtgccagaggttaacattgggtctgaagtaggcaaggcttatataacttaggggtagaaggtttctaaatgggtactttattgggcaaaataggtggggttaaggagcagaacataacaaggtggtcaaaacaagttgtaacaagcttttgaatcaaaggtagggttgcaagacggtcattacagcttaaaacaaagacatgattgcagggtggttgcaaggtagttataccaaccagtggtcctaacaacaggtgaccataataaccctttgaaacaaaggcatggctgttctttcctggaacaggcagtacagaacaatttgtagttaaggttacaggtggggcatagtttactccttgagaaacaggtttaattataaacagggtgagcctagtttgtctttattgtaaggtatttgtaagcctaaagtggaggcaggctggttcatcactggttcctttgaggtagtcctcatggctttgcgtagccaggcctctcagccactgtcttctagtagttgggtgtggttgaatgtggtgcctacttagtatcactggccagtagagctgaggtaccctcaagccaagcttttgtctggcccaggagagcagatttttgtaggtgtgtctcattgtggcgttttgatgctagaattacaaatgcacttaacagattcattggttttgttttgagtaattattctttgaatggtgctgtctgaggtttctggttgtttactctgacattcagcaggcgtaattgctttgacttgcacacattaattactgcagtcactggaagctgtaggagaggcacttgctgccacctactccatgatttacatctcccccgagctttgaaggaaaatgcaggtggccagcaggcagatcagggctggcagcaggctggcaagatggtctggaatcctgtagatgaaggtctttggacttctgtccacctttgcgattgctacccgtcttctcagtcctggccaccatcatttcttggctggataactgcactggttgccttttagagctcagctggcatctgctgtgtccatagctgcatagcccatgttctctctcacacccttccttgccctggctcagggaccttcatgactcattcctggctgcagtctttccagcttcttggggctttcctaacccttccctctagatcagttttgggtctggcagcctgcctagaacactgttagaaatgcagacttccaggctctgctccactgctctgaatcaattttgcattttaatagacccacaggtggcttagtgcacccagttctccatcttgattctgggaactgtgtgtcttctatctccttcaggcttgtcaacttccacagaagcctgtagacttctctcacacaatctacctgagtcctcctaggccacatcctctcttccttcccacccctctagcatttttgtagggtacattttgtagtctgagatagtatttgctgagctgtaaggccacagctcctttgtaaatgtcacctcagtaaggatggggacccattatgtcttgtacccctaaacccatttatatgaacactgtctggtgctggcatgatgtcccaaaaagttgtaagaactgtacatattgtaccaatcctcagggctccttgattttctgttatttagagaggtaaactgaggcacagagagggcatctgtctgtgcagttatctagatgtgaagttactgggctttgatatcacatggacaggggactggagggtcatacagacaatgggcaagttgtttgacttctaaaattttttttttttttttttttcgagacagggtttctctgtgtagccctggctgtcctggaactcactctgtagaccaggcaggcctgcctctgaaatccgcctgcctctgcctccgaagtgctgggatcaaggcgtgcgccaccactgcccggctgacttataaaattcttacctctgtttcctatgctctgtttctaggctcagcatcaggagtaagaatacctcataaggttaccatgagcattgcgtatactaatatacataaagttctatggatctgtttaaatttagttaattagggtgacactgtagtttagtagtgcttgcctggcatctgagaccctgggttcaatctcagtactgccatccccaattcctcatagttttagggggtcagaggcctggacttggcttagcgaatccctttgattcaggatctcaggagcttaggcaaagtatggggtggagttctagtcattcaagacttgctgggttacagggtgggttcttccccttctatgtgaatcagagatgggagccttccagagaaatagagactgttgttgttttcttgtaactgatcctagaagttacacatagcagtagcacttagcactagaggggatgaagaagtccggttgatccccaggaagcatatgctacagttaatagggtgggacaattaagcaccacttaaaatagcatttgacagccagtgagcattgtgtgaaaactgggggacagctgttgtcagtgtcttcactgaaggatgaagagctggtaagaataggagctgaggtttgaagcccaggacgggctacataatgaacttcagctgcactgatcgccaagtgtcaaccactgagtatggaaatcccaggaaggattaacgtgctgagcagaatgatacgttccaaatggcgtctccgtctacaagttaagggcttccgtatggctgccaagacaacgcaggaagtagctagcaagcctggtaactcaagttctgtccccatgacccacaagtattgtggctcatgtgtgtctacacatatccataaatgcagataaataatttagtgctataaaaactttaaaagtcactgtttttttattttgtaaattagttgttcaaactatgagaaatgtctttgatgtgtgaagtttaaagaaaaaggaagaaagaaagaaagaaagaaagaaagaaaagaaaagaaaggagggaaaaaagaaaggaaagaaaagaaagaaagatggggaaggtctatttatcagctttctgttagcataacagaacctgagacaatcaactaaggaggagaaaaggttcgtttgagcccacattcccattaggttctagtcgtggattgttggtctctgtttttgaacctgtactcaggaagcattctcttatgggaagtacaaaagttggtcaccttaggaccaggagaaaaggaggaagaggaagggtctggaaggtctcactgtctcctccaagggcactctgccaatgaggaagaccatccactaagctagtggtggtccttaacctgcagatcacaactctctgtggtgttgaatgacccttttacagaagttgcctaagcccattgggaagcctagatacattactatttataatagtagtgaaattatagctttgagttagtgatgaaaatcatttcatggcttaggaagccaaggctcagagctcgtctcagttataataatgaagatggtccagtcatacactgtattcacaataggtatgtgggttgcattggcgcactccctgtggttatgtaaggtgtgaccgccagggaaaactgagccagggctgtgcagggcctcttgcaattatcttctaactttctgcaaatctttaactatttcaaaataaaaatgtaaaacagtaactgcatctgatcattctcaggggtcggtagccagggccccacacgaggcctttgtcctttccgagaaggtatgagcacattctcacgtgagacctctcatgttccagagatgaaagtgttcatttcccaccagggcaaagctggctgcattaaactggcatctgccaaagatttctatccagtgagcagatatgttcacatggtgtctcatcattcgatggaagggatttctattaaaattctgtatattacattaggtgtgatttttagatggaatcttaacatattgttaaacaaatgattccgcagccacctgaaacactttagtgctggccagagatgggatgagtagggagtctgacggttggcctgtgtgggaagcaggtaggatgagagccagaggcccaacattgaaactgtatctgccctgtgatggtggtctttggagagcagtgtcagctttctcccatacagacatgtgtatattgctttcttcccttagtctgaagatactatatgatgtcacgcagcaatgggtgagagtgagttgtgtggtgaggctgtggttagagagccttacaaagcatacagtgcagttggtacacatcagggctagttctcctccctacctgtctcctcagagcttgttgtttggtttcagacgattgctgtcactacttcagctggagtaaatgcagtcactgtggacagatccctggcagtctgtcacagtgtagtgggagggcttatttgtggtttcctttatcaaagcttttgagatttgtgcaaaactctcaggtgattcttgagtttctggtgcttcctacatttgagcctgatgctgtcttcccaaactgaccgcaaagaacagtacaaaggaggttctgtacacactgcttcacagtgtgaaggagtcagtataggcagtataggcaggaccagtataggacctgcctatactgactctgccgcagtgtgtgtggtcagccatactacatgctgtagggcaccgcagcgtgcaccagctttgctgttgactcctggcggaggtagagatgaagcagatgacaaggaatgtgattttacttccagccaaaatgttagagaaatataacaggcattcttccctatgatgccctcgcctgcacatatctctgtatgacagcatggagaggaacacagcactaatggctccatttcagcatgctggcttttcagctaattccctcttcttaaatatgttctaattgttggaatattttgaaatgagtctttttatttgtttaatcatagaagaaatcttagcttgagccctttttattgtgaagcagtgtgtttaatgaaacactgaagacctagggtaggaagtgagaggcagaaatagaaagtgaacaaggagcctcttgtgctacagctgatgagagaccaaatctcactctccagagagacacaagaaagtctgtcttggggacagagagacagggtttcccggtgagcctgaccacgtgattttgttcagaaacattatctgttgaactcctcgcttattcagctgagagattatgacagattcattgtgaatttttcacaaatgatagacagatgaatgtgcatgtgtgtgattcagtgagcttctatgggtcaaagccggtggtgggtagaatggatggatgaatgcatgcatgcgtgtgtgatttggtgatctgtcacactcaaggtcaaagcaatgtgatggatagtaatgaaatgtccatttcctctcctggaacctcgtgtcacatgatgagccagtatacctgggacatgatttgggaggtggttgtggctgtatcccaggtccgttttcccttgtggggttggagatggatttggtcactggttcttcctggtgtcccactttccccatctacaaagtagtagctgtgctagtttctgggatgaatgtgtaagtacatagcatgaggcaagccatgtaatatgcaggagctggtctggtatgagtcgccccagctggactgtgtttagtgtgtgcatctgtcagtggtgaaatacaaccaaatgcctgaccctcaagaggcatctggcaggcaggtggattcccataacatgcttacactccaaggctgtcaatggagggaggcacaggaaccagttagcatttaccaacattacaaaaccaaagttccagaatgtattcagaagtatggcgttagtatagtcattttcagtgttgagctgtgaaacaagatagcacattaacatttataagatacaaattgtgtgcttttttttttacacagatctcccccacccccaacccccccacttagggtggaaatttttagtttttaaatttgttttttttttaaacattcttatacctgcagagaaaacgaggtgctcaaagtccagctgaagaaatatgtaggagctgtccagatgctgaaaagagaaggtcaaacagctgaaggtgaggtggagatgagcccatgggggaggggcggctattccctgggcaggctcagagtgtacgtactctatctgacttaatagaaaactggtgctggtggcattccagagtcagacagaaaattttgctgtatattcttgctaaatgaaaactaaacttcttggcttagtaacagttgtatgatgtgggcacttatgaactttagctctagaatattgtgagccttgtggacagttgattgacctgaggccaggggtgtaagcagcagaattcacacaggtgagaactcagacctccctggactcagacttgccaggatatcatctcagctctcttgtagtttcctttttttccttttttttttttttgttttttttgtttttttgggacagggtttctctgtgtagccctggctgacccggaactcactctgtagactgaaagaacatagtggggggaaacccccccaactaactccctattcggcgtgcacccaagaatcacgaacagaacacaacaccttgatgtaacaacacgaggtagtttaatggcggagctccgggtcgaaacgtatctcacacaggagacagtggattcgaccctgagactcaaaaactcggggtttttatagggtaggggtctaggaagaattggcgccgttacacatgattggcccattcaaacatcagcaacatgattatgagtcagcagagtagtacgtgcaggcctgggcgaataagaattctaaagcagggggcttttctgcatctggttaatgtttcagcttttaactatgttctctatagaaaggggggtgagcaggagtcgcgggctgctggatgtcaatgagtcagccaagttagtcagaaccagttcctgcattccttcccttatctttacaaccgggtgacctagcttcaagatggactcgggtgtgcccaggcttctttgcagtctcagccccaggcctttttagtttaaaccttttattttatttaatttcctttcatagaccaggctggcctcaaactcagcaatccacctgactctgcctcccaagtgctgggattaaaggcgtgtaccaccatgcctgaatctcttgtagtttcttaatgtctcattatctcagttttctcatgtgtaaaatgggatagttggcagcaggcaacttatatggattagcacagataggtactgggtaatgtttcactattactattatttattattttaattttgagaattttatggatatgtgctgtaagacccctgaccctcagtcaatggtacttacttcgagaacccctgagtgagacaccgagacacagattgatgcaaaagcaagaggtttattttcaggcacgttggggtcaacctcaatcagtccttcaaggcaagtgtccagaaggtaaccccagaatggctattacaaacagtttttatactttttaggggcacaggttatatcagcaaggttacagttcaaacttattggctaagcatattggcctttaaatccatgctagcaagagtggcacacatttgaactctacctgggactttccagagggtcaggtgactgtcagtacattctgagaagtttttactcaagaatgttcctgtgggtggagagtggaacttggcctaaccttgacctgaggcgggtgggtgtaaggccaacgaaagcccctagggcccttcagtgcaatgtgttgggatcatattcacccttaccccctctcttaaccacatcacttcctgatatctcctttcttcccagcttgtacccacctctgtttatgggcctacagaatatgcatatgggggggggtcagaggccaactctgtggtggtccttaggatctgtcatctttattattagaggcatggtagctccctgaactgggactcactaattggtcagcctggacagcttgtgggctcttcctcctcagcccctgaaatgcaagcatatgtcatggcatcagctttttcacacagatgctgggcactgaactcaggtccttaggtgtgcatggcacaccctttaccaaccgcaccacttctccaacccctgggcttgctttcgatgtaaaaaccagcactatgagatgcactcctgaatcagggttttgggagcacttctcttcaaatgtacgagcagagttcatagtgttcagattgcagctgaagttccttttctcaagatagagcctgagtgctctgaagcaaggctacatgtgagccttttgagtatgcagtgtgatcaccctagctgaacctcagtacagtgaccagcataatccattgccaagtagcagcagcaccttttcatgttctactgtgtgctaagacacactgtgcctaggccatgctctcctactgtgccgtgtaagacacactgtgtacctggttgtcctctcacactgcaggccttacagggatgagctcattactgggcaacaccatttgctctgttgttgcttatcgagtcccgtgagtttctccttttcatcagttaccaaaagaacatcagccacttgccagcacctgaaacaggcttggatcatagcctaggctgtaaccctaaaactcaaagctggggcaaaaggtttgtttgttcaaagctatcctgagctgtacactaagaccctgttccctgcccccaacccttcttccagatttggccattacagagagcactgtgtaggcatgtaatgaatagtcacatggtactgtataactgtgtataatactgtttgtttaaacaaaacaaaacaaaacaaaacaaaacaaaaacaaaagttgtaaaaggcagtgcttcccaaagtggcacggcaactttcttcccaagcttgaatcttccttctaactaattaggactgtctcctcaagccctggtagacttgtccagtctggactctggtgcccgaaggcttataggagttggagttgcctcactgagagcctgggggaagggatactttatgcatctaattcatgatgtcctttggcttctggtctaagcgagggacccaatagtatctgttccctgagttatacgaggaaactgagaatatattttaatagcataagcaagtttagttgcaagcaaagtatcttttttatatgtggcaaaactaactaatgcaaatgtgagctcatcagagggaagagactgaaaatcttttcagccccaagtgcctttgcacttgacagaagtcccgagggctgactacaaccttcatctttataatcttgctttggaaaatgccttcaggattaaaatatacataatacaaaattaactgtaaaatactttgtcaacaacctttaaatttacaggtacaagtcctctcctgtttgaaaggcttttggctcctgttgtggttgttagtgggggtggggtgttctccactgacctgcatttcctagctaggctgggagctcatggaagcttgtatctccctttgcattgactcttactctggaggtcctctttgtcatcttcctgcagtgttacagctttgacaggagggccacagtatcccctagggacgagcttggcaattattcacccactgtaatttctctggacattagaccacctctgttcatgaacttggattccttccttctctagggagctgggaccagacagttgcatgtataactagagagcagaagttgactctccatgcttgagagtgggaagaaatgctcagtgaggaaagtgccctgtaaactctgagctgggtccccagaacctaacttaaccaagctggctgtggtggcgaatacttgaaatcccagccctggaaaggtgcaaggcagggtcagggatcactccagctccagaggcacctagactagctaccttggcaatttctagggcggtgaaatggttttggcctgagaatacctagaggaggccttaggccacattatcgatggataaatcctcagccagggtcttcctagtggcctggcccctcctctgacactgtagaaagttggtgctcctatcattctatgcacacatagaaaccaaaaccccacagctggatgtgtgccaggctacacacacagtcaggcttctgcaaggatgcagactggctatgtgcatgtgggctacacacacagtcaggcttctgcaaggatgcagactggctatgtgcatgtgcaggaggttatgttgggaagctagctcgtgtgactgtggccatccatctacttcaccatctataaggcatcctgcaggctagagacttgggaagagttgatgtcacatctcgactctgaatcttgtgaatacaccttttccatagactttctcttccatcttaaggccatcacctggatgaaacctagccatgtgatacagacggacagattcacagttggtgcttgaattagcatttgatcaaatatctgcatacctaccaagtttagtcatattatcagacaccaggtgggacatgaaactaaccattattgccccctatccagaaagtagaagtcaagattcctgcttgaagccaagcagcggtggcacgtgctttaatcccagcactcgggaggcagaggcaggtagatttctgagtttgaggccagcttgagttctaggacagccagggctctacagagaaatcctgtcttgaaaaaccaaccaaacaaaaaaagattcctgcttacacttactaggtctgacctgttttccttttttccaggtttgatcttccaggtggttttttgacatgagatgcatgggtccccagcctgggtgtcctgtgctgagctcactgaagtgctggtctgggtgcacaggctctgtctttgggcagctatttcactggtccatattaccatttcattttattctgagaaaaaaaaaatacacgttttggggaggacatctttctggatagccagaacctgtcatgtgctgtctctacagacaaggaacagtgtaggtgacctcttagagccgactttagaccctttagctcacccacttcttggcaggggtgctgtggctagacatgcttgctgtgggtggtggagagtgcagagaaggcccttttccctcccttacctgagaacactgctccttccttggattattatgccactgcctgaggagggagcctggggaaatgattcttggaggagggtaaggcggggtatgtgggcgcagtcgcagcattgtctgcctttaagtggtttcagagcttcgcatgttcatttgggggctgaaggtaatggcggtaatgaaagcaataacaagtggtggcacctttcaaatagcaggcagttttcactttaggttgggttggggatattttgaagctccaagctgaggagggtcaggtgaattagcagacatctgtcaattcctttctgaaagatgagcgatgatggtgataactgtctagtgaacccctctggaagcattgcagccattatccagatgaaatagtatctgagagtcctgtaaacaaacctctgggaagtagttttacttcctgcctgagaggttgaagcagctgccatggattctcattcatattcattctctctctctctctctctctctctctctctttccacacacacacacacacacacacacacacacacacacacacacacacacagtgttaatatattgtaattgcaacctctttaatacctagagactagatatcataggactcgtttgtccagtatgtacaatatatcagcatagcaaagttacatgaggtgcacacagcacacagggggatggataagctagaaatgtctagcacaagaatggaatctttttgcagttccttccctcccacctcttccatccactgaacaagtacagccggtacactgatctcagaggtaggctaacaattctatttctacacacagcatttctccagtttaaaaaactatatacacaaaatattattctacaacctgtacattcaaatgtatcaagcacttttatatatctaaaagactagatgcttcatgtaagaacttctctgctattgacatggcgctggtaaataaaaatgtatgccaagcaatggttattatctgaggtatcttctaaatataaccatttgggctttgacccactttcttctcccttcaaaccagtagacaaatatagtcatgtgtaatgcttagaaacagctgagcaaattcctatccccaagccatttacagaacaaaattttctatgaattttaacagtgtacactatgtgctaaatttactactttgtcatacattgccaacctctttaacatctagagtctagatgttgaaaatttagacatatttgtccattatatacagtacacacacagcaaaacaaaatgcaaatatatagaaatggcattggaaaagatcacacacatacacacacacatacacacacacaaacatggtgtgtgtgtggggggggtaagaaatgaggaataagatgcatacacaatacaataggatgaaaaagaggcacgtcttcttcacaccaccaatttgtctctggacctcttcttcctcctgctggatcctctaaggtactgaacaaacagggacaagtattgctcctgggtctttctagaggcggcctaaacaattccatttcaaagtcacttgtagaagacttgtctacgatcttctttttatagcgactgggtatacacgtgatctcctacctctactttaccctgcatcggcaatctctacagttagatgtccagatttagccaaaagccaaaaaagggtcgggggaaagattgagagcagctttttcatattatatacacagcccttctatggctgcatgttaagtcgtcgccagcgtttccgattggctgcatgcggttgtcaagtcttggcttctcttgggtggaaggaagacctgtggctcagcaatggtgatcgttcctcttgccgagattcagggtccgctcaccttcgtccaggaccattgaggcctctgttcatcctgtccgagtgctcatccatgagtgagcgatggcgatggcagagtgttcttgctcagaccagccgcttcaggctgcataagccccgaaggcccagcctgggcctttaggtggccgccattctttctgccatgccgtgctcgctgccacctttgagaagtcctcgaaggcctggctggggcgtctcggtgggcccaaccctggagagcagggggcctgtggagttatggagtccgctgccatccagacgcatcgttgtcagggaaagagtcgttgcagaatcatcgtgtggcctggccgtggctaccttgaggttcctagcaaccgcaggataggaacagaggctgctccgggaccccctatccctctccggctcacccggcacctggccgaggctgtgggggccccggtggaaaaccaccttactacctagctcactgcgctctcttccaaaactcgaatctggactcttattctgattttttttgccttagcttccaagtggcagggactatatccacccatcctgtattatttttaaaacttactttatgactttgtgtgtaggtgtggggtgtatgtgccctgacacatatggaggggagagcacagcttgtggagtcaggtctctccttctgtctttatgtgggttccagggattgaactcaggtcaccaggcttgctcagcaaatgtccctacctgctgagccatattacccgccattcacctcaggttttgagaaatgaacatggaactggtttggttagactagctgcctagcaggccttctcgagcttcatgcctcagccccccaccccaccccacccccagtgctggaattacagctgtgttaccgtgctcagctgtttgcatgagtgcactttactaagttctgttctcagacttaaaaggattgattttttttaaaaaaatcgaatttactggaaagtcctagggagtaagtagtagagctaacacagtctgtattcacctctgggcattaacacatttgtattttccatacatatttcagattttataaaaaaaggatttgttacagttagagttatgttgctacaataaaaccctgaccaagagcaccttggggaagaagaagtggttgatctggcttttcctttcttgtctggtcgtcctccggggcagagactttctgacatctggtcgacctccgaggtgtgaagaaaaaaaaaaaaaaagtccacctgggtgaagccagagcaggaagtggaggcagaaacctcgtgcaggagttgtgtgagaccataaacagtgctacttcctggctccctgcgcacggctcactcagacctcgttcttagacagctaggactagctgctgcaggggcctgggcctcccacatcagccatccatggagaaaaagccgggctggcagtgctggttctttgacctcagcacttgggagacagaggcaagaggatccctgtgtttaagacctgccgggtttacagatgagttccaggacacccaggtctacacagagaaaccctgtctcaaacgctcccttcttcccctgccacctccaaaaaagcagaacaagccccacagacaagccccacaggcaggcagtctagtggaggcagctctgctgttgagggtccctcgtccgtggcgactctcatttgtgtccagttgaaaaaccaactaaactccagtgtaactgagagtaccttttgggttgttcctacagatgacccaccttagctgctgtgtttctcaaccttgggacttggtgaggtaggggaggggtggttagcgctttgtcaagctggggtgacatgaggtggggtcggccccacagcagcatcactggtgtgagcacggggctgagccaagccagggctctgaaccaaaggaacagatctgacagagaaggaagggatggatgtcagcaggccctcagccgactgcactgggcatgtgcaggaagccaaggccgctcagcatttgttagatgcttgttggaagggcagtgtggaggtagtatcttaacctcatttttacagcattgttgggttggacgaggcttggctatattagaaagaaaacccaaacagtagtaacttccacagttttctctcgcacacgatatctggaagtagcttgggctggtgtgggtggtttctggccacaggccctcaagctgcatctcttcttatttttgatgcatgtctcttactctttttttttttttttttaaagatttacttatttattttatgtatgtgagtccactgtagctgtacagatggttgtgagccttcatgttgttgttggggattgaattcttaggacctctgctcgctccggtcaactcccctcactcagtccctgcttgctccagcccaaagatttatttattattatacataagtacaatgtagctgacttcagacacaccagaagagggtgtcagatctcattatgggtggttgtgagccaccatgtggttgctgggatttgaactcaggaccttaggtgcagtcagtgctcttacccgcggagccatctcactagcccatgtctcttactctttacgattgcctcatgtcccctaaagacagctgttgctctgccaccatagagggtgcttttgagcccggggataatgagcttcctttaaggagcattcagacctgttctccacagtttcttcttgaagctatttggctggaaaggtgctagctcagtgtgcatgtgtggaaggaggggagattcctggtgacagcagtccctgcttctggtgggtttggaggtctggtggatgttacctgtgagggcgggcctgactccaaaccactctatgccatcactcaaagtttcagcagaggcttggggtcatagttgctcaggaagccagctcccagtcccagaagcaacacatgtgccctggtgacctggtgatctcaggaagtgtttatttgctgacctgatttcagtcccagccaaacacttttctctcccaaatcatagcggaaacagttgcctggaaatagccagcatcctttggcttttctctttttcattgtttgtaagaaacagacagccttgcttagcctgttcatccccctccatatttgccagtgtgactggggtccgctgcttgtcggtcagcctgtcgtctggtggcagagcctctccttgttggaggttgacaggtggctcgttttgttaaatgcttctttggtttggaaacactgctctgctttagtttctaattatacgtttctaaggcagctggtcattttactttgcttgtgtttgtagagcctgcacctcagcacagagagacttgtctaagtgctttccttggaatgaatggaaaccatttctgaagtgacacagggatccgcaggctgggcgacttcctcagcttgtgccctcattcttgggccctgcacttgagaaggagcacgctctcttacgccacatctcatcctcttccccctagaactttcctactgtctggcacccctgtacgctagacagagggccagccccacaggccctccctgcttcatctgttgttgtttccccagtttttcactctcagaagtgtggtcatgctgcccagttggatcatatttaaaaaaaatttttatgtgtatgtgcctgtgtgtatgtatgtgtatcacatgcttgcatgaatccatggtggtcagaagagggtgttaacccccatgggactgcattataggcagtggagaactaccactgtgtgggtgctgagactgaacctgaggcctctccaatagcatatgtggtcataaccactgagccatctctccaaggcttgcccagtgactttccaaagcctcgtttgctttccttcttgacatatttgagaaacacttgccaagatgcaagctgcttcagaggagggctactgtgtttgtctgcttgctctgtgttatcagggattaaactcactgtcctgccagtgctctattacccagtacagccctgacttggtttggtgtctatgggtgctttctggcatttggagagtgaacagcgagcatgcactggctctttgaagagctactgtgaaggaagctatgatccaggacctttgccagcttcttctgcacagccagggcttctgcctgctaggctgttctggtccctgtgtcctggatggtgaggcagaagcagctgaaggttggagtgagcgtagacagtgagctagcctgtgctcaagtgtgtatgctttgccttgtgtgtatgctttaggttatgttgtcttaccaaaggtgtgcccaaatgggaagtgagttcttttgtctgctcctgtgtctggagacaggatgagggagctgacacttgctgccaggcattctagacctgggctgggcccaagcttcctcatttccatcctttgctgaccctctctttacagtgtcatggttttagggacccagtctctttaaaactcctccaggtgtggtcaggccctgcacacattgccttgaattcttcatgcctgcattgtataccaggggctgtctcatcataccgttagcagcaagtgcttcccactgttggggagtaaggaggccccagtgctgctgggcagcctggtctctgctcttagctgccatctgtgtaaagtgaaggataagagtgacagccaaggggcactcactgttaggtctcatggaggaaggggctcttggcatatccaggccaaggaatgttgcagagactgtgccacacaagagaccttaggcaagagtttgggttgggggggggggctggtgaaagaccacccctgaaggtgaaggagggagggagggagggggggggtgatgacatggactgtataaaaggtatctcactcctagagacagtagaaatgagttgcatttggtggctgctgataacatggccgctgagttgctgaaggtggaccaagggagtacccaagggagcatctgagggggcacctagacctccaatgtgggcagctcctagctttctgtccttctgcttattatagaatgtgaggaaataggaagggatggctgctgagacagggatggaggcaatgtgctgtttagactgcttcttgttgtcttggagtgtcaacatctttggacacccaagcaagctaagatgaaggccaagcccaggaagaacaggctgtttcacttgatgtccaggctgtgtgggacctctggggctagggacatgcaggcaggcagtggatgccaggctgaacctcctggggctggccgctttgaagctgtccaggatgcagagtttgaaggagcgtctggagctaacattaaggttgctggaacagatattatattgggggcagaaggtaaagtcaaggagtttaggggaaacttttttcttagatgtctttttgaaacttttaggcccatggtcctggtagttgggagaagggaatgttaagatcagggaaagtggaggagaggtcaccctcaggaataaccagaaaaggcaggtggggaaacaggctgttgattgacagtacttatctggagtccatttgacccatgagaggtgggttcaacttgattccctgaggcttacaaaaatttctgagcttacaaaaagagataagttttagatatatcagcatcaccactgtttgtaacctgtactgaaatccacattgtggaaaaggcagtagtctcacacctttgagtcatagtagaagcttggggaccctgagttaaaaagacgaacactcctctatccagaaggctgggtgtgtgtagactggacagatgttttaacacggagagaagcactttcaagtctatacttagaatacaatcaaaggaaatttaaaatctccagcttgtgactctagtagtagtcagtgctttaccagagctagactgatggctcatcagaactccactgactgatgccaaaaccgaacttttgagctcttaatgaagcaatagcatagagagggaatgaaacccaaaacattttcatttttaaacatatctttaattacttctttatacatttatgaatcacatttatatacctttctcaagacacctttttagacttttatatcttgcatttacatatcttaaagcatttttctatccaatcatttaccatgaggcagctgaggccttggccgctgctgtgaaactgacagagctatcactgactactgtatccaccatcagggatctgagaaggtaaactttacctgagagagcagggaatgcagagcaatcagctcctcacctgttaaacatgacagagactcatcagctacctgggcagccattctatgttcctccatggtagtctggatttcagtggtgacagagggctaaggcagcatgagggctcagaagatctgacagactttcctgtggaggaggaacttggagggccagcctaccttgtctaggcagagcagggcaatcaactttctagtgtcttgtttgtctacagtttggagaaaatcctggtgactggcaaagtaaatagcattaaccatgctaagtactaatataattagttatagtaataaactttatgttttcatagttattttttaaaattaagcctaaagcaaataattaggaaatggcaaattttgtttagtttatttttttgtttgtttgtttttcgagacagggtttttctgtatagccctggctgtcctggaactcactctgtagaccaggctggcctcgaactcagaaatctgcctgcctctgtctcccgagttctgggattaaaggcatgagccaccacgcccggcttagtttaaatatacttaataaataatggccctcaaactctttggagagctgctgaatgtggcatttgcccagtggttatctgaaaatggtggttaactcacacgatacatactctttaacattagtaaagatgggtgccagccacatggctgcttacatcatcatgaggtcatcagccaagatggaggctacttaaaaacatctgttgctacttaaaaacatgcttttctagtagctttatttttttttaaatgagagttgaatccaagttacatacacatatacttacatatagagttgaatccaagttacatacacatatacactccgttgaatctaaggtacatatacagtatattctagacaagagttgaaacacacacacacacacctgctgttgtgtcatttggaacaggcacagactcagcctacccctcctccccaataactgccacgtaacagagggtcacaggctggggtcacacaactttaaactactctttatcttttgttggcttggtttttggaagacagcataaaatttatcttcttggattctcagttattatttttcccctttccccacatgagtatgaattatagagggctgttttttgggatttgactctatcacaagagaactagcttcagtgggagcagtcctgaggtagcttgtgtcccattctcttttttgtgtaattgaatattttatcaggttttgaacagcaatataatgatccctagtcacccatctcttctagttctctaagtaaccagaaatgaatgatacatatgaatgtacacagacagaccttaggctctctgatacgtgtacctgctctacatttttctctccaaatgtgattcgagcatactgggttggcttgggaacaagctgccttgtttgtaaacccagtttttaaaaaaaattctgtatatttccttggctgtatgtttgtgcagcacatgcttgcatatgtgtttgtgcagagggtattagattacgtggcactggagtttataggctgtgagctgctatctgggtgctgggatttgaactgtagatctagttctattgtgacatgcccacacctatttgttagtatcactgatggctgctttcatgaggcagttgtatagctagatagttccagcagagacaggaagggggtgtcctctaaaatacacactaaaatagttatcagctgacctttggaggaattggaggtcccagacctgccttgtcttttccaggtaacactgtcacttaatagaacttttctgggtcatcctttcggtatcagaatattggaatcaccatgggtgtgctgtctgctcacaaatcattctctgcatgtataggctggcaggtgggggcgggggtgagcacaaagacctcagtgcctccgatagggacagatggcagccctggaagtcagtgtcatctagatctagatcttgactatccctccagcagcattcaagcacattcccaccccagcagccagcctgcagtccgcttcctgggctttagcccagcctagacaggagacctgtgatcctgctgttagaaaggtctgtgaggcctgccgctttactctaacttccctcgcctttagcagacagttgaaaccagctatggctggatctgggtgctcagggtatttaccagcagagccagcactgtgtgcattcattctgtttccagaccagggtgtttcctgttttggcagaggaagcgggttgggcaggtacactagaatggaggccgaggggctcagggcttgcatcttgggtgtgggcagcaggagcagggctgagctgagctggagagataggcagggccagaagaaacctccaacccaacctccacattacttcctccccactgtcactcaaccttgggtttccgagctcgtcagactctgcctttaaagggagagtgacttttaggcacctaaaatatttttcttttcttttctttttttccttcttttttttctctctctttttttgaaatttctgacattgtttgaatttaatgattcatattacgaattattcatgaaaatgatcttttaagcttcttataatagctgaaattatccttcattagatactgacagttcctgtgatgggtgtaattataaaaaatattcttaggctagctatattctgcagtgttaaaattacgcaaatgagcaagggacaggaatagaagctgagtaggatggtcagatttcatgggataagggggagggcaccgcaggctttctaaaaatgaataaacatgtgcttgggtgtccagcgagcatgcctcccgcacagtctgccttgctgctcagccgcacctccctggcacgggagcagaggcatgccagtgacgggcttgtgtgctacgcttgcccacccatgaatcgtgggatggagaaggttctttttctctccccttttagctctgttcactcagcattttctgcaaggcgcactgtagtaatcctaggtacttgaagagagtagcagtttgctgctaacagatagtacagggaagggaggaatggagcaggaagtagggccctggggctgggacagtcacctgggtgacagaacctcatcatgcttatagcacaggacagccagggcatgcgttcccagctcatggagaccacctggttttgggggtttgagctcggtactttctctaaggttctatatatctggctgtccttgaacttatgactctcttgtctcggtctcctggttattcggattatagacatgcctactctgcctgacttagattctcatttttgattttctgtgctggaggcagacatcaggaccacatggcactccccagctgtagacaagcactcaccactggccacatccccagccatcttcacttattatgagacaagtttcacaaagtcatctaggttgttcaaagacttgctgtatagcgcaggctgtttttgaacttgaagtcattcctcatcttcctgagtagcttggatgacaagtctgtaccgccatgcctggacttctctcggtatcatggaggatgagtagaaggaggctgactcagtttattgtatccatgtcttcacaccccatgctgtgcttctcaaagcctctgagaggcgagctggttactgcagttgccactgccggccctgcactcgcatgcacatgcaccagctatgtagctggctctcccatcttcccagttttgacctagtctacttaagaaaactttaggaagagagggtaatgagaaacagtggagtgtggccacatttacgtgtgccagcagccaggcatagctccaaatgtgctctggtgtaatctctgtgtttgtcctgcattgctaggtgtgatgaggatcttcactcagccaaggaggagtcagagcttagctaaactctcacacacagattaggaggtgagacaatggtgtcagcttctcggggctggtgatggatgctttggggaagggctttgtttacccttccaaaggtgctcaaaccttccttccttccttccctccttgtttgttggctcactcattcttccctccctccttccttccaaccaaccatgtcttatgtatcccaagttgaccttagaattcctttttagtagagaatgacctggaattcttgtctgcatctcctaaatactgaggtcacaagcatgcagcattgcatctgttttaggcagtgctgagaatcagttaagaattcatgtattctaggcaagtacctgccagctgagccgcatctgaagccgctgtttgtgttatttggactctattctgtgtgtcttttagatgctggacaggtaggtgaattctgcacttctttatgacattgctgagctgggggtagaacacagttctgacctctgtagtcttcttctaaagggtgcacagcccttacatcttatcatctccagatgatagtgtcaccatgtgctctctgtttatactgcaaagccaaaggccagaagctggcaaacattttttctcaaagtttcaggtacaagtagttcaggttttctactgtttctgcttcctctttctcctgtttctcaccctcaacttcttcctcctcttccttttccccttaatatgtacaaactttcagtaaacccaaggctgggtttgtgtgtttggtacatggtatgtcaacccacgttagagatattgttaatattaagctattgcttttagataataaatccatgatggtgagctgtctcagtcagcgaagtgctgattttatgggcataagtgcctgactcagttcctaaatccatgtagagaaaactaggtatggcgatgtgtgcctgcaatgccagcactgaaacaggcaggctcctgaagcttgccggccagttccaggccaatgagaggctccgtttaaagaaacacagtggccagcgcctaaggaaggacccttgaaattgtcctttaacctccacatgcatgcatacacatgtgcacatacttgcacactgcacacgtatgtatctgtacacacatgaaggaaggtttaaaacctggactatccttgcaggttgagttttggtatgagttgatcagttcctcacttggaagtccttctgagcttgcttaccccacatcaccctcttgttggtgtgctgcaaacaccctgctcctctgaaaccttcccagatgacacagacaccagtgtcagggtggctgaattagccagcttcctccactgacacagcacctaagacaatcagcttgcagcaggtaagagccctttgcttctgagttcagaggttttagttaatggtcagttggcatttgtgtattgcacctcaggggaggtagaatgtcagagtgtggagcctgtggtggaagaccccacttacctcacagcaggaggaagtatgaggaaataacaagggctcaatcatatcttgagggtggccctctatgacctgacttcttcctactatgccttacctcctcctaataggacggttatctgggctccagtgcctttcgcccgaaggctgcttgctttcttgttttgtctatgctttttttcccacagtttgcagaaagaccatgtgacattgtaatgactggactatgtgtgctaaactgaccgagttgggtgtcccctcccagcttcccatgcttcggagaggagtgggctgcccgtatctgattggtagagtgctgtcttcttatagatccttggctggccttttcaggccactgactgtcctctagttttagctgtctcaactgagggattgcttccatctatttggcctgtggccctgtctttgagaggctgttttgattgatgattgatttggaagagccccacagcccagtcactggtgcctgccttaggcaggtggtcctgggctgtgcaaggaagctagcaaacctgagtccggggtaagccagtaccagtggccctccgtggtttctgcttgagttcctgctttcacttacctcagtgatggactgtgacctggagtctaagttgcttttggtcatagtgtttatcacagtaatagaaagcaaactagaacacagctgtagatgttttcctcctcactctgaaagcaaaccatcatgtgggtttctctggtgagcagtggtttgctccgtgtggcaagatctgggtgatgaagtgggggtgagatccagcgggaccttcccgactgttgtattgtcgctctccttttggctcactcctcacctgtgcttcagccctccgtggccgggatccatactgcagcctcctgctgtgctctccatttgtttcctagaggcccagcggctcatgaaggctctgactggaccctgcctggatctgtgcccttgagagtttttagctctcgatcaggaaagcagtttcttcctccctccagcgtgcccatcttaagagcaggtcctcggtgcttcccagcacatgttaccaagctatgcaaggagtacaagagtgggcattgacatcactcttgtggaatttgcatggatggggcaagcggtacatctccctgtctccctcccttttttcctcttgtcttcctctttgcttctctccccatgggccagccacccattctgatgccagatggtctgcaaccaagtgcttgcgctggaggcttacagatggttagggaggtgcacagcaggatgcaatctctgtgattcaggcagatattggtgaattcaaggcagcccagttcacatagcaagctgcaggccagctagagctaagtaataaggtctgtccaaaactacctccttcacagcactgcagacatgagctcggttctgagtgagttagagtctgtaatagcatccagatcagcccaggaagtttgtacattgcagagaaatgtgaaaagttgaggtctttcctgagttatctggaagatttgaggtgttgatataagaattttgttttgttttgtttctgaacttatcaagtcttctttctctatgaaaaaaaatgcatcctttaagtcaggcatggtggtatatgcttttaattctagctgtctcaaggcagaggcaggaggatttctgtgacttcaaggctagcttcatagtctgcttcaggtcagccagagccgtctgaagacaaaactaactgcagcacattgcaggagccaatcccggtttgctgtaccacccttgatgtagttaacttagtggtaacaatccacagatggatggaacagtcagactctggctttgcccccaagatttgccagcctctactgtgcctcctcgttggatattctacaggactgcgccagaaggctcaatcgctcccctacttaccactgatttctctgcagtccctgctgctccgagagggcaatcttagagaccatcaatccctccacttagcgtttcctgaagacaactcttgtttagcattgaggacacttcagagtgccatgtgtgcttgaggttaatgcacagccacagaatggtgcagaatgactgagttcaacatgcctgggagtttgctttgctgtaaccagaggctgggaggtgaggtgtgtgctcaggagtttgtaatggctgcctgaaaaggagtatgtgctattaaggtaaactctttaaaatttgatacattttgcaattttgtgagttcaaaaaggagagagagagaggaacacaagggctgtgtgagtgacagacattaggtcttggggcctactgggtctgcatggtgttggtgctctgagtcaattggaaagacagtgtcactctagacaaacattggcttcttagtagcaggggactagcttctcatggcctgaacatcagacagacagcctcgtagaagcagatttattgattgatatgcaaaagttgttgtttcttttttgggtgtgggggtaaaacaaatttcttatactaaagcccataacctaatatatatgtttgtgaagaaaaacaccacacccctacaacttaagttatgtatgagtgtatgtttgcagtactcaataatgcaagatattctaggtctgcaggatcttctgtggccaaagtcatgcctaggctttacgtaaagctcctagaaaaacatctctatagataatacaacacaagcttggttttctacagtgatttccttaaggtcagatacttgtagaagataactatttcattcaaatgtttaccctagatacaattagtctgctagatttccttctacgcatggagccacagagtggtgtttcctttagaaagaggcttagaagctgggcattcgcctgggatctcagcatttggcaggctaggcgggaagactggaagtgtgaggcttgccagagttcatactgagacactgtaacgagaagcgggtggctggaattggtccatggaaatggaatgtgcagaatgagcctctggcttgggtagtattatgttacatcgaggacacctgctagtggattgtgtctgcacatagagcctggctgtgatcctcacttcagacctgagctcagcatgtctgagaaggcaacctagtcatggaagatccttaggtctactgggatatgcggcccaggactatagggtccactgctttgtggctttgttcgagcctatgtccttctcataactgcctgcctgggacccattgggtggtgtcttagtcagggtttctattcctgcacaaacatcatgaccaagaatcaagttggggaggaaagggtttattcggcttacaattccatactgctgtttatcaccaaggaagtcaggactggaactcaagcaggtcaggaagcaggagctgatgcagaggccatggagggatgttctttactggcttgcttcccctggcttactcagcctgctctcttatagaaccaagactaccagcccagagatggtaccacccacaaggggcctttcctccttgctcactaattgagaaaatgccttacagttggatctcatggaggcatttcctcaactgaagctcctttctctgtgataactccagctgtgtcaagttaacaccaaactagccagtacaggtgggtactattctcttttctttcttgtatttttcctggattccatcctgtaaagcacatccccccccccccccggacattttttcatttttggtacttgctttatgcttggcagcagtgagccagccttgcaggggcgagtgtgccacttgctacattgctcctgctccagggcaatgctttttgtggccagccatctggtaattcagtcaacaaggattgaggccaggggagttgccatgtagggggtgggagaaagagaaagggcatgcccacagagagaggagaaggaggggggagctgggctgtaaagttcacgattgggggcagggtatgccaggtagggactgaaggatgcagggagaatgggaagccaggtctgcattaatatgtaaactgtgtacatccatcccttgtccgggtccaaaaccaaacaaagtacttgaggtgtaagaggcactgaggtttctgtcagcagaggaaggagagatgcagatgcttctttttccgcctatacccatgcaggcattactaatcaatcaggatacctttcccagaatccctatttaagcttgggaatatttcttagcacagtattctagatgattgctttcaattgctgagaatagtagattctcaaccttttagcaaagatctagtgtagtgcttgagctctggctcagttgttctagttctaccgttggcattttggtctcttttattctagtactgtaactccagatatccactctttgcaacagtgtttctcatgcaaatatggccatgttgattctctacttaaagctctttagtgacctcctgttgctttctaaataaaatccaaactcattaccaggacttataagactgtgcctgacttggctcctgctcatattatgaatcctgtctatgtctcttttctgtccttgctttcctgtctgtttgcttgtgttacctcattatccttttgggagcattccatattttttccacccttggcctggacagacctaaaccttgtctctccatcactcttgggagagctaggagcatagaaaattgatctggagttggagaaataagttagctagaaaaatacttgtttttcagacacagatctaagttcaatctctagcacccaccaaaaagaaaaaaaagacaaaacaaacaaacaaacaaacaggattggctcatcagttaagagtacttattgatctacctgaggctctggggagagatacttcttgtcaacatgtggcctgctgtgtaagttgcctcagtgaatcctggggtgtaccaagttcttcctcatctgtggatgcttacctctgcttgactagctcctcggtactcccaggctgagcttggctatgtcacctcctcacagagcactttcctggccttcctatggcagttgcttctgacagtcccttccagcatcttacctgtattctctgtagcatgtgtcataatgatatgggaatcctgagtgtctttgggagcaaaggaacctttcaggtctttagtgcttagcttgaggggccagaatcctggaaagccaatgggcatcaaagccaaccaaggtttgaggcttttggtttcatgcctcctagtcttctattcttgactctgaagccagagccacatggccaaagctgcagggttctgatgcttattagagctggaacatggcctccttattctagtgggagcatggtagcacccaggcaggcaggacactgaaggagctgagagttctacttcttgttcccaaggcaaatgggagaagactgacttccagtcagctaggcgaagagcctcaaagcccacacccacagtgacacacttcctccaacaaagcctactccaacaaggccatagctccaaatagtgccacaccctgggccaagcatattcaaaccaccacaaaccagatccctgttttctccagttccttcaccaaaaattttttcaaaatagattaaagacctaagtgtaatatcccaaagtgagactgtcagagcaggacatgggtatggacagagttaacactgcaaggatatataaaatgtgatccccttttaaaagcacagtacacaggcaaaagctggcagggaaactgcatcactgaatagattctgaacagcaaaagaaacagccatgggaagagacggcataaatgatgggagaaagtacgtggaagctctgcttctgactggaccttcatatccagaaatttacggaagctcaaaaggtcagcagcaaaaataaataaccctggtaaaacgcaggcaatagatgactaggtatttctcaaaggaagctgtaagtcaggcatgatggcccatgccagtaaacctagcacttgggaggcaggctctgatggcttgaaagttgaagactagattgggcctgggctagaggctgtccccaaacaacaggcaagcatgatatgtctaccaggtgtatgaaaacaatattagctcggtgacattcatcatcaaatggaaataaaaaccacattgaactatgtgtgtgtgtgtgtgtgtgtgtgtgtgtgtgtgtgtgtgtgtgtttgtgcactccagcacgcaagttctggtgaggatttacaggagagatcactggggatataaatctatctgtatggaaatcattatgaaaattccacataaatgaaaagtggagttatacagtgatttacagtcctactcctgatttgtaggaaaaataaaatctatattgagggatctctgcaggtgtcagatcgggaatcaaaccatacaatgagatgagactaaaacccagtgcagattgacttcttcaacctgggtcagactctggggagtctaatgccaggcggctcattgtcagcagatgtaaaacacaatacaatttaggaaaaggtttctaggcaacagtcagtccaattgcaggttcataataaagcttaagatgtgactgcatagaaactccttttcaatgtacatgtgaccactaggttgtgttctatagctgaaaggcctagagtctagtgtggtctctgaccaatagcttctagaggtcagcaggccatagagtacatttggcatctcccctaaggatggataatggtgtgtgtgtgtgggggggggagactgggataaatttggatgacgtctgtctctatagcaaaagatgggtgaggtctgcctctaaagatagccaaaaggcaattaacaaagtctactcccaggcttctggacaggataacaggcactttatctcctccattgagaagccccttgtgtttaacattcctggtttccctagtaatctgtgggtgcaacagcctttggacctcaacactgaatgttgaagagacatctgctatcccatgcagcactggtcacacaatagctaagaaacagtaacaacccatgtgtccatccattgatggacagataagcaaaatggacgtactcacagtggattgccattcagccattaaacagaaagaaattctgtcatacatgacagcacagacagaacaagaggacattacgttaagtgaaatttgtcagtcatggataatatgagtgttgtgtgatgttgtgcatgtggcacctattgtttgatctcagagaagtcaagagcaaggataaggctaccagggctgagggggctgaatatagaccccagtgatgggctgtgcatccaaaccctggaggaaatgacccaaaatgttgtgattataaagaaatatatacatatatatatatatcacacgtatatatttaacatcaagaagcatacccatattgaaacatcatatcccgttcattaacatatataatttttatcatgcttgttaaacataaaggaaagagaaaaaaatgagtaaaagaccaaaaggaaagagaaacccctttccctcttaagtcagaatgtaaattggctgtggcacatagtggttaaataggatgttgaattcagtgtcactagtgccaaagcagctccctagagaagagggagggctcagtgcctcctccaggcagtcaaagctgcggacacctctgaaacctgtttagttcctttgtatgtctgtcacgaagccttttctgttgctgtgtggccatgtgatgattaaaagtagagtgatattctgtcaagagttttcttaaccattttcctttctttttgtttgtcctttttttttttttggtggggggtgggagtgggagggatagggggtgattgtgacagggtttcactctgtagaccagggtggcctcaaactcacagaggtctgcctgcctccgctgggattaaaggcgtgcgccaccactgcatatggattccttttgctgcactcttactattatttttggctgacagacactgcaggaaatactcctgcattggcagcccccgcagtgcacctagtgattggaattcggtcctgctcaggagggcagatgaaggctgtagctttcctcacttcccttaggggttcccatctggctctccagaaagctgtgtctatgaagtgccaccaacaagcagggctgcagactgctcccaccaaacaagcctatagtctgtgtttgcctgtaaatggcagcaggaaaaaactagctttttatgtttctattccctgacatgctgtgatttcttcttgttgtgaatggagttttgttttagtgaatactttgttctttttttttttatatgtgtttttcttatttctcctccatctatcaggcatccttatctccttctatctatgagtgaggacacagtgaaaccctggaattagaccgatccatggcagtttaaactgccgcaactatctgggactgggttgggtggcagagagaaccacaaaaaagaagagccttgacacttttgagggagcatgtggcagtgggagggaccctgtaaactggaatagccggtgagttagagtatggggaaggggactcagggtcagaacagcctgggactttgatctgtttatgtgtggattccagagatggacctcaggtcaccaggcttagtggacagctgtcagccccagtctaggcaccttaacaacccacattttgagaatgaagcctgtttgtctttggcaataccttaaaagggcttaaggtccagtggaaatccccttgatgtttttccatggcataattacttcagtagtggatatagtttaaaagcttgaatctcaggcttagattttctttggaaaacaaaagaacagctttgtttttaaatctcccagtgagcttcacagtgggtagtcaaaacttcaggaagtctggccactgaagagagtctaattctctacacagctacagagactccatggggatcagcgtggagttgatcatggtgaattaaaactcaaggtgctatgaagctggtgtggaacctgttctggtggtgattcacagtggttcctctgttgaggaattgcctgccttagtctggcctgcgggacatttttacaattgctgattagtgtgggtggtctcctccctgggctggtggggccaggctttatgagcaagccagggagcagcactcctctgtgatctctgcttgacttccctcagtgatggactgtgctgggatgtagaagctgaacaaactcttttctcagaacccaaggtgctttttgctcctgggtattgtatcacagtagtggaaaccaaactaagaagaaggatttgaagctttggcgtcttctgcctcattggggtttatatagtagtctcatagctgcaacctacttttccaattatgttttttttctattttaatacaattttgttaagtttgagaatttcatacaatgtattttgagcacactcccagtccccccaccaactctcctgtcaccttacctgttctaactctgtgtccttcttttccctatgaaaataacctgtcatatctaatttgttctgttcttaactcctgagtgtgagtgacccagtgaagtgtggtccaccagccatggctcacacccataaagaaagctgattctccctaatctaaaagccaataattgtcaataacttgttagcaagaagtagcagcttgtgagcccctccctttctatgtgggatgctaactggcttgatcttgtgctgattttatgcatgcaggcacaggtgcggaggtccttgggggcagaggtcctgtcatgtccagccttccctaacctctgcacccctcttctatgatgtctgctgatccttggggatggtggtatggacatcccatttatgcctcagttctccaccatcttgttctctgtgcttgcatagttgtgtccattgatctatggagagagatacagtttgacaactgtgtccatttagcaaaataataacagttggctcactcctggggctggtgcgtgtttctatttttagagtaggccttaactcacaacccagttgtttacttactgctgaagatactacacattttggtcacagaactttaaaaatttttatttctttttctgtgaccaaaaaaaaaaaataataataaaaatttaaaaaaatcaatgcttaggaagtgtaacctaaagccctgactgcagtttcagagacttagtccatatcatcatggtggggagcatgatgcacacagacaaacatgatgctagagaggtaactgcgagctttacgtccagcgagaagagcggcttggtgggggctttttgagacctcaaagcctacccttcctccaacaaccccacgtctcctaatcctttataatagtgccactccctgtattcaaatctatgagcctatggaggccattctttttttattattattaatatttttattagatattttcttcatttacatctcaaacgctatcccgaaagtcccctataccctccccctgctctgctccccaacctacccacttctgcttcctggccctggcattcccttgtactgggggcatatgatcttcgaaagaccaagggcctctcctcccattgatggcgactaggccatcccctgctacatatgcaactagagacacagttctgggggtactggttagttcatattgttgttcctcctacaggattgtaaacccttgggcactttctctagctcctccattgggggccctgtgttccttccaatagatgactgtgagcatccatttttttatttgccaggcactggcatagcctcacaagagacagctatatcagcatcctgtcagcaaaatcctgctgacatatgcaataatgtctgggtttggtggttgtttatggtatggatccctgggtgggcagtctctggatagtccttccttccgtcttagctctgaactttgtcactgtcattccttccatgggtatttttttccccattctaagaaggaacaaagtatcaccactttggtcttccttcttcttgagtttcatgtgttttgcaaattgtatcttgtgtgttctaagtttctgggctattatccacttatcagtgagtgcatgtcatgtgtgttcttttgtgattgggttacctcactcaggatgatatgtggaggccattcttactaaactaccactagtagtgaggggctccttggggactttgggttactccctccaatttgaagaagagcatataagatgcatggtaactaaaacagatattcttccctcacaagttagacagggagaaatccctctgctgggtgtgggtctcctcatctgcagtcctggtgggagccatgaatagccttgtctgggaggtgcttcacccaccttgcccccttgagccccaagtcaggtagtggtggggaggggtgagccatacttctatatatccagttctgcacactggttggaaatgctctttgaactttagaaaaccaactttagtgggatacagttcttatgtggtatcattcaactggatgaagaacaagatctgatggcctaatatgttcactgtaccacatgtctgttgttacagtccactgtggatcatgtcaccatccccaaaggaaaccctgcccatcagtaagtagtcacttcgaccattccacttcctgtctccgtgattacacctgttctgaatatttccagtagttggggttaaacaatacgtggctttctgtgattgcatgatttcattgtgcatccacatcataacatgtgccaggaggtcagctttctataactgaatccattgtgttatggaccacatcttgcttattctttttttattattattggatattttctttatttacatttcagttgtttttccccatccagttgaatgataccacataagaactgtatcccacttctccccttcagaaacccccatcccatcttccctacccctgcctctatgagggtgctcacccacctaccttcttcctgccctgcattcccctaaactggggcatcaaacactctcaggcccaagggctgctcctcccactgaagtacaacaaggccgtcctcatatgcggcagagccataggtccgtccatgtgtactctttggttggtggtccagtccccgggagctccggcggaatctggcctgttgacactgttgctccctccatgaggctgcaaacctctttagctccttcagtcccttctccaatgcctccatcagggaccctgtgctcagtccaatggttggctgtgagcatttatatttgtcaggctctggcagagcctctcaggcgacagccatatcaggtgctttctctccctctctccctctctccctctctccctctcctcctctctccctccctcccttcctctctctctctctctctccctctgtctgtgtatgtgtacgtttgtatctatgtgaatgcacatgtatattgaggtcagaggtcattttaggtgtcactactcaatagcttgtatcttgttcttttgtgtgtagattggtctcactggggccgcagacttgtggattaggttagactagttgatcaatcacccccaggaattctgtcttcaccttcccagctctggaattccaagcatgggttccacaggttcctgcgagtgtacagctatttgtgaagttgctttttgccagttctaaaatcagaatgggttgttactcagagatagaagccccttggctccagcctaaatattctgggttctatgtgagtttctatgttggtcctccctggaccatctctccagccagggcagaaatcacagagggaggtgcaggaaagcgactcctgctcatttcttcccttcccccgactttctccctgtctaacttgcaagggaagaatatctgttttagttatcatgcattgtgtcagatagacacaatgtcgaattcctcctcactgacgtgccccagaattggcagaagtccttagagaccaatggcactgtacaccctgcagtgttccctgtttcctgtgtagggtggtcccagacccacagtatttaatccaaagtctggccagggagcatgacccagtttccatttgaaggtttgtggctttggtgccatgttgagagcagtgtgagcagactgtatctcgctctggctggaacacaggggccatgctatggaactcatcatctctacctccatttccttgttccctcctttatgggtagacttcccctgcagagccctgggatgctctacagggtcccagctctcaggtttccatcccaaggctccacacacaagggaggagtgggaacctctgggtggagagactggcacgccacacttgtgttattgaaaggaaattaatcagtgttcaaagcagaaaacttaaacagaataaaaggcggtggcaacatgggttatggatttgattcatgtgtacctgtgtgcgtttggagaatagatgctgacttataatcacagttctttcagcagtgtgcaaaccttagggaaccaaatagtaaccggcgaggactcagaaataaataacaatttagggttattggaaaagtacaattttctgttcctgtgggaattgttcctgcctggaagggcagaatatatatgatttaaaccccccatctctcactttcttcttaatatatgctgcctctgcttgcacagatgactcagaactgcttttcatatttatttcccagtactgcgggttttgattttatatctctggcttccccacttcactccaacacaaacctcattaaatgaatacctctccactgtgcttccccatttaacacaactgctcgcttggtccaaacaactttcactcagttgctgtcttagggggtactgtaaatgtttgcttgagcactggtgcgtgggtggtgggaaagttggcatgtcctcaaggctcattgctcctggccttggatgtaggtccttttgttgttgttgttgcgaagttgctgcaaatatggatgtttccaattcttctggctatctagacactcttaaaatttaaattacctgaaaaaccttcagaacctcaattgtgaagaaagcaagcaagggacatgaagcccagagtgccaccctcttacataacatgtcataatatgtgtgggtccactgggagtgtgaattggctgctggtaacacggatgtggccctggtagcttagacagcatgacttattctccatagaggggcaaactcataggccgaccagagctgctgggcggttccgatgctttacctgtgttcctgccctatctctgtgccactgtggctcagatcctcaccagggtatctgtgttctggtgcacacagaggagagaacagagaggatagtgtaccgaggctcagaacgttcccgcacatgccctctgccccagttgcataggtttgtgtctgaacccacagactccagccagcaggggcgaattaaaccctgccagtgttgatgttcactaactctatttctactgacacagagttgtaaaacgtatttgctgatctaaagaaatgtctctgttaaggaaatttccaaaggttggactgagatacaaagaaacaaaccaccagaaattgcagcctccagagcacaggcaccctaggactgctcctggtcttttttctttgagcacagtgtgcctacctaagggagtgaaaaccatcctggcctgccatttgattcttgcatttcagtggaaattctatcatgaacatttttgtcactgaacactttttcttaacgccacctacacaatgtctcgtgcttcccaggtagtggcccttctacctatgattggattcttaatgctggaacactggctctcaatctgtacttttgatgggatcctgattagttctctggggacagttcctgaagagctagagtaggcagttcagggctcttcataaagaaaatcaaaatgcttttcagaaagcagcatctacacaacagccatgccatgcggggcgtgcttgcttcacctccgcaagcattggattcgtcccttcagtcttttttttttttttaatatattttttatttacatttcaaatgtttttaccccttcctggttttccctctgaaaaccccctatcccattcccattccccttccccctgctcaccaacccaccgactcccacttccctgtcctggcattcccctacactggggcattgagccttctccagaccaagggtctttctgcccattgttgtccaacaaggccatcctctgctacgtatgcagctggagccatgggtccatccatgtgtactctttggttagtggtttagttcctgggagctctgggggtactggttggttgatattgttgttcctcctatggggctgcaagatccttcagctccttcagtcctttctctatannnnnnnnnnnnnnnnnnnnnnnnnnnnnnnnnnnnnnnnnnnnnnnnnnnnnnnnnnnnnnnnnnnnnnnnnnnnnnnnnnnnnnnnnnnnnnnnnnnnnnnnnnnnnnnnnnnnnnnnnnnnnnnnnnnnnnnnnnnnnttctcttcctttgttgggtctttgtgtggttttggtatcagcataactgtgggttcatagaatgaattgggtagtgttccttctgtttctattttgtggaatagtttgaagagtattggtattaggtcttctttgaaggtctgatagaattctgcactaaaaccatctgttcctgggctttgcttttttttttttttttgtttttttttgcttgggagacttttaatgactgattctatttttttaaggggttatgggactgtttagatggtttatatgatcctgttttaactttggtattttgtatatctgtctagaaaattttacatttcatccagattttccagttatgttgagtataagcttttgtagtaggatctgatgatttttttgaatgtcctcagtttctgttgttatgtctcccttttcatttctgattttgttaatttgattactgtctctgtgccctttggttagtctggctaagggtttatctatcttgttgattttctcaaagaaccaggtcctggtttgattgattctttgcatagttctttttatttctacttggttgatttcagccccaagtttgattatttcctgccatctactcctcttgggtgtatttgtttctttttgttctagagctttcagttatgctgttaagctgctagtatatgttcgctccagtttctttttggaggcattcagagctgcaagttttcctcttagcactgctttcattgtgtcctgttcttttgggtatgttgtagcttcattttcattaaattctagaaagtctttcatttctttattttttccttgaccaagttatcattgagtagaacattgttcagcctccatgtgtatgtgggctttctgttgtttttgtttctattgaagacaagccttaatctatagtgatctgataggagacatggaattatttcaatcttattatgtctgttgaggtctgttttgtgaccaattatatggtcaattttggagacagtaccatgaggtcctaagaagaaggtatattcttttgatttaagatgaaatgttctatagatatttgtcatccatttggtccctaacgtttgttagtttcaccgtgtttctctttagtgtgtgtttccctgatctgcccattgatgagagtggagtgttgaagtcccccacaattattgtgtgaggtgcaacgtggtgtgcttttagctttagtaaagtttcttttatgaatgtgggtacccttgtagttggatcataggtgttcagaattgagagttcttcttctacttttttttttttcctttttcgagacagggtttctttgtgtatccctggttgtcctggaactcactctgtagaccaggctggcattaaactcagaaatctgcctgcctctgcctctcaagtgctgggattaaacgcatgtgccaccactgcccggcgagagttctcctttgtagattttttttttttccatttatgagcgtgaagtgttcttccttatcttttttgatgagttttggttgaaagtaaatttttatccagtattcgaatggctactccagcttgtttcttgggaccatttgcttagaaaattgttttccagcctttcattctgaggtagtgtctgtctttgtccctgaggtgggttttctgtatgcagcaaaatgttgggtcctgtttatgtatctagtctgttagtctatgtctttttactggggaattgagtccattgatgttaagagatattaagaatagtgattgttgcttcctgttatttttgatattatttttttgtttggttggttggctttcttcttttgggtttattgaaagaagattactttcttgctttttctagggtgtagtttttcttcttgtgttggcgtttttcatctattatcctttgtagggctggatttgtggaaagatattgtgtaaattttgttttttcatagaatatcttggcttctccatctatggtaattgagagttttgctgggtatagtagtctggactggcatttgttttctcttaggatctgtatgagatctgcccaggattttctagctttcatagtctctggtgagaagtctatgtaattctgataggtctgcctttacatgttacttgacctttttcccttactacttttaatattttttctttgtttagtacattgggtgttttgattattatgtgacagggggatttcttttctggtccagtctatttggagatctatagacttcttgtatgtttatgtgcatttctttctttagggaagttttcttttataattttgttgaaaatattgacgggccctttaagttaagaatcttactctcttgtatacctattatccttaggtttggtcttctcattgtgtcctgcatttaatggatgttttgggttaggagcttcttgtattttctttgttgtgtcaatgttttctatggtatcttctgcacctgagattctctcttccatctcctgtattctgttggtgatgcttgcatctatgactcttgatctctttcataggttttctaactccagggttgtctccctttgtgatttcttttatgtttctatttccatttttagatcctgaatggttttgttcagttccttcacctgtttgtttgtgttttcctctaatcctttaagggacttttatgtttcctctttaatgtcttatagctgtttacctgtgttctcttgtatctttaagggcgttagttaagtcctttttaaagtcctctatcatcgtcatgagatgtgattttaaatcataatcttgcttttctggtgtgttggtttaaccagggctcgctgtggtgggagaactggtttctgatgatgccaaatgttcttggtttctgttgcttatgtttttgcccttgcctttcacaatctcattatctctggtgttacctggtcttgctgtctctgactgtggcttgtctctcctgcatgcctctgtgtcagtagtcctgggaaaaaacttctctctgggaggaatttatatatggaaaactgtggtatagggttagctctggggtgcagacagaaaccagaaggatcttgtatccagctgatccttggtgtctgtgtcctgatggctctgggagggtccttcttgggccatgaattcgaagagatgtggtagtcttatctccacttatacaggtttgtttgcactcctgggagacgggttgtctcctggtggtatttgtgtatgtagctctgtggcacagacagaaactggaaggctcttgtcccaggctgttcctcagttcttgtgtcctgacagttctggacaggtttctctgagcagcagtcatggtcctacctgctctcacaggcttgtctgcactcctgggagtctagctctcttccagagccacctggttctggagcccagtggcagaggacctgctccaggaacagacagaaaccagaagcttcaattcttaataattaaactgtatatttgtttttattcctctttttctaaatatatcaactgttttgcttgttctcttgggttttagagttgaatattcaaccccagttattccaatattaattagttttttatttagttttattttatgacatatcttgttatgtagcacagactagtcatgaactcaacattctcctttgtcctactaagtgttgggattacaggtggatgctattgtgcttgggacatttaaaaaatgtgctactttaaaattagatacttatgttttatattttttatatctttttatttatgataccatttctgtgcctctcttgtggcaaatatctttatccttaatttttctgtgcaatttttaaactaagatcagttttttactttgcctaatcaaatcttgacttttttgtgatttattccattttcagtatttgtgagtccctgcttgctttttttaatgtcaaattttcatattttctacatgacttttaaaattagatcagatttgaaagattaatcagtatttaattgcaattttataaactacctgagtccttaagagaaatttgatagttattaagcataagtgcttgtctgtctgatctatagaattcattattataaacaaaacaagacacttggcttaatctggagtagagaagccctgcaaacagctcatataatttatatgaaaggagtatttcatgatataatatttgataaaatgtttatccagatcacaaggtggatgaccagggtgctggtattacaaggatcctgtctgtctttggatctgtctgtctgttttaatttttcatgtttgtcttcatttctttctcctttttttttttttttttttttttttttggtttttctagacagggtttctctgtatagtcctggctgcctgctgtcctggaactcactctgtagaccaggctggcctcaaaagaaaatttgcctgcctctgcctcccgagtgcggggatcaaaggcgtgcgccaccactgcccggctttctctctccttctacgttggctgttactaatgagtctgcttcccttccttaattcaaatccacggtggaagagggaggcttcctaaccagtgtcagtcctgaagtgtatgagttataggatggctccacctctagctcacttgggaatccgtagccctgttagccctcatctgtcaggccttattacatgtcttccctggagctgggctcacttggttgtgggagagtcagtgatgtgacaaaactggggacaaatgttccggacaacagttagatggtttcctaaaagctctgtagcaggagagtggcttgtgagtggtggaggaggtggaggaagctgtcagagctttggaagcaccatcactgctgatctcgggtattgccggtgttggtgttggtagtgtgtacctgacttttaccctggaaatgacctctcgccttcagtggttacagagagttagtcgactaaccccctcaggggagagcatgggttccaggagttgtgttatatctgattttactggcttttgttattactagtgagtccaaaccaaacctggctcagcagaaaatgagggcattcttcccttttgatcgcctctgcaccagctgatcttctcactcagggaggaagcagacagacattagtgtgtcagtgtgactgtgtgggtgtcagctaaaagcaccaagagaggagaagcagacttgagcaaggcacacatggatgcatatgcatgtagaggcctacggtggatggtgggaaccatctttgattgctcttctacctcaggcactgaggcagggtctgatttgaatgcttatagtctagtcttagtagccagcttgctctggggaccccctaccacagctttgtcttctaaggctggtagatttaatgaaaagagtgtatcaaatagttatattaacctccatatttatttccttgtttgttggtgttttctagtttgagtggtactctatatttctgagaaaggctttgccaagcttagagtaaatggccatgtgattagggcttagtgggctgaagagaaagttcatgggctagggaggtagctcagacattaagttacaaaggaaatctttccgtgctgttgtgaggtccataggaaacccagttggcatgtgtatgtcctagtagtgcagaatcaggcaggcaagtccttggagctcactccagccaccctagcatacttggtaagctgtttggaaaaatcttgtctttaaaaaaaaaaaaagcagctaagatgcctgagaaatgatagctaaggttgttcttcatatgcaggtgcatatatgcacacagctcccagacacccctatacaaagaaaatatatacatgcttctgatatgctcagggatgctagtgccctacttgagtcctttactttggccagacacatgtagggcattagactagattgatagctatagggtttagttatactcgatctctttagaagagtccacagacttgattaaggcctgattctggctttcccagaacctgagtgggtttatttgatatccatcacagcagggtgcttctctgtgaaacaggagaaccactttccaggtgtgctgaagagtcaggtgggttatgtaggacactattaagactttgtcactgggcaagcctgtttccaagtccactgttctagtagggttctctataggatgaatggtgaaaatcactaatagaacattctggggaacccctttggaagattccaattagcaggggctggtttgctcaccagcagaacagttggctttgaagtcaacctcaggtgaagtggataatgggtatttaataactatattctttaaaaaccacacgttgggctgaggagacagcttaatgggtaaaatgttttctgcgtaagcatgaagacctgagttcagatcctcagatcccatggaaagccaggtgctgtatcatgtatccataattcagcattgctacagagagatgggaggtggagctaggatatccccccaaattaccagacttgcaagcaaaaagacatcccatctcaaaggtggaaaccaaggaccaacactcatgctgtgaaacatgtatatgccatggcactcagacatccaaacacacatgtgcacacacacacaagattctttaaaacctacacctctttggctcaccctctcacatcacactttcccttacctttcctgctatcttaaccttagagtagtctactcagtagggtaggctctcattcttggaagaggaggggtctgtgagaccccaggggagtaccagccctgtcccctaacacctttcatatgtcctgggcacaggctttatgaatggaacatggcaatacactcttgacattcttttttctgtacctttggtgcagatataatcaatcctttatgcatgcacatgtctactaatgtagttgcaggcaaacaggttaaatgtctgtttttccttctgaacttcatgcccccatgtgcctgagctcagacccctagagtggggctgtcacagggcttttgtggtctgctggactggttgtcttcttcgatcccctctgagctcttgttgcagctgccctatacctgctgtctgctcttgtacacctaaagtctcttttcatgcttgggcatgtcactcacttcatgcaagatttcgctagtagagcacacttcaggctgttggggcacttctttctgtctttcttaaaatttatttattttttatgtatgtgagtacactgtcactgtcttcagacacaccagaagagggcattggatcccattacagacagttgtgagccaccattcggttgctaggaattgaactcaagacctctggaagagcagtcagtgctcttaactgctgagccatctctccagccctcttgtcctcttgtaaaggcagttttcattgactcttgggcttgtttagagttctttaaaattttttaaatcacatatatttattcattcttgtgaggggatgtcagatcatggatgtagaggtcagaggacactctgcaggatgtggttttctgctctactgtgtgggtcccaggaactgaactcagggcatcagacatcgtagcaagcacccttacccagcgagctgtctcactagtcttcatcaactctggtgctgacataatcatatataaaccacatatatagaatacagggtttcttggaaggaagatgaggttttcagtccagacttgggccccagcataatctaaatggaggcagtgtctctgagccaaactgcagcaggagggctagcagggaggactctccccccctgcagcaggagggctagcagggaggactctcccccactgcagcaggagggctagcagggaggactctcctgagccatggagcacactctgccacctcactcacctttctcaccagttgctcctgttacttaatttgaatagagttttctgttgtcagagagaacagcaccatttcccttccggagttgtggtagtttattagtggctctaattatagtgcttgctttagaataaacctcatgagcaaaggcatttgaggaggaaagggtttatttcattttacactttacaggtctccatggagggaagtcagggcagaaattgaaggcaggaacccagaggcagggatagaagcagtggccatggagccatgctgcttactgtctttctcttgatggctgcttgcttgcttaaacctccagaaccacctgccgagaggtagaaccacccacagtgggctgggcccttgcacatcagtcagtaatcaagcatctgcctcacaggcctctgttaggccatccttacttacatttcttcagttgaagttccctgttctcaggtgtctctagctttggtagcattggcaagaaaactaaccaatagttttacaaacctcgtcaatagaaattgtctccttatctatttactattttgccaccaaccagatgtagttggggagcctgctgtgatctccatgggacccatgacactgacctacaacagccaacttgataaaccaacacagtgatgcactggacttatagagatttttagcttgaattatataaatggcaaacttatgaaggggttacatccaaatagcctgtcatcagctgatagtacacagagcatagcaggtgtcacagcttagcagcactgtgctaagagtgtccccttccctctcaatctgtagccttatccagagttctgttgactaccaccacccagcatgaagaggtggccacactagagggctagtgtgggaaaatattctaattcaaataaaaagtatagtttctgttgaatatgtgctgttcttgcgccatcatgaaagaatacattttggctgagcctttgtaagccaggagctgtctgtacatttctgctgttgtgtcatggtagctgaggagagctgcatttcatctgtgcctgtcctgtgggacttagaaccatttgggaataaatggccacattatatgtggcctcagggtttgcaggtactgagtgtggagatagttgttgttattctttatctaacatggaatacctgaggacatccacctccctaggggcatttctttgcctgtcagtgggagacctgctggtattcagagcttgcattgctgcagcagcctacagagagactgacaaggtggtgtcaggtagcccatatgtaggcagaggcaggctcaaccctgtggcttttggtgtgacacagacccctccccaaattcctcctgcttttcctgccttctgctttctccagggctctgcactttgggttcctagacataattaggattttcagggaagtcgtcaaggcagaacatctctgtgggctttttgaaatagcctctgtcttgccatttatcatggtacctttcccaatatgtcaaagttcttctcttactgcactgaacttctgagtttgtgggactcattcaaagtccagtatggccatggtggcccctgacctacttgcgctgactttgaggaacagtgttggttctgttggcttagtgtgacacaggccaaggaagagtcttctttctgtctgcctcaagttgtaatcagctctagttatgctgggtgatttggcgctctctctctctctctctctctctctctctctctctctctctctctctctttctttctttcctttttctttcctcaactttctgacagccttgccccagcctcctgagtgctgttaaaaatacagcttggtcttcatgtgggactcctaacagcaggagcagggggctgtctctgactctattgcctacctttggatccctttcccctaactgggctgccttgtctggcctcaatataagaagatgcacctagttctgctgcaacttgatatacaaaggggagttgatatctgtgggagacctccactttctgaggagaatggagggagaggtaagatgagagggaggtgctgggaggagaggagggaggggaagcttcaggcattgtgtagagtaaataaattattattatttttgtctattaaagaatatttcttaaagttagaaatgaaactttatatacattaagacacgaacaggtattattcacataaatataaaaaaatgtttccgtcccttatatcaaaatgttataaaataccatgaaaacaatgtccatttctggtttgcatttattttcaaagcatgctatctttcttgttgaacaatatatatatatttttttaattagatattttctttatttacatttcatatgttatcccctttcctagtttcccctctgaaaatccattatcctctcccccctccccctgctccccaacccacccactcctgcttcctggcccaggcattcccctatactggggcatagaaccttcacaggacctagggcctctcctcccattgatgaccaactaggccatgcccagctacatatgcagctagagccatgagtctctccatgtgttttctttgattggtggtttagtcccagggagctctggggttactggttagttcatattgttgttcctcctagggggtaaataaattattgaatgaatgaaaaatataattaattttttgagaatttcatgcaatatattttgatcatattcatcctcaaactcctcccagatctgctctctctaccctcatctctctacccattcaacttaaatcttaaaacaaaacaaaacaaaacaaggagtcctccaccccacacagcctaaaaactattaagtgcaatttgtgttgcatctggggatggagctgtgactgaccaaccagcattcagctgttaaagaaagctgattccttctctctccagaatctatcaagtgcaaataactcctctccccttcttactgggatcttgtctgctttgaggtcttatttgtgtgctcactattgctgtgtgtgcaactaccctatgtgtctacaaccactatttccttgaagtcatcccagctcttacaatctttctgcctcctgctgctcagtgaagatctctgagccttgggagaggggtgtgatatgtccattctgttgagggttgtgcctgactgataaaaccccattttatttattgctgtggcactgtggtggtctgtgctgatggacacaggcagtgacaaggtacaggacccggtctctcatctcccttgttgcaagctttctcacagtacatagttaggtgggtatatttggcttttgttgtgaccaagcacaggagcaaagcaacttaaacgatcaagtatgtgtttagatgcatggtttcatagaattctgtctactatggcaagagggcttggtggtatcgagtgactcacatcatggtggcagggaaaagggatgggaaaaggccaggataagttcagccccagagtgacaacccagagctgtgctctctccagttggcccatattctatatttttactccttctcaaaaggttgtcacatgatgaacccatcaaagggttaacatgctgataagatgagaaccctctaatgtaattctttcaggaatacccatcacaaatgcacccagaggtgctagtctaaccaagctgacaaccactgtagtgaacagcatcttagctggtggattctgccagccctttagtgtcaagacatgtctaggtataccctccttctgcttcttctgttgtgaaccactgtgccaagaacatgcacatgcgccgtgacctcaccccagcgcattccctgacttggttctttcttcctctacttttgtcgactggtaacaggaatacccttacacataaacggagactactctgccttggtgaaaagtgtagatcatataatcttcattttcacagaggatcagctacgccttctgtgtccacacacgtctcacacagagtagaaagttagcctctagcagccacactgacgagtttctggtagctagtagctggaagatagtcagcttcatttcagagcagacattggtccatgagacagcacaagctccacatgctcaggtcacaggcctcactgattgcctggagccataatggagactctgcctgtttctggagtagtgagtattagggctactccccaagtttgtttgttttgcctttaggatagtttttatcaggtgctgctcctctgactattgtgtgtgtagaaatcacctttaatattaattaaaatgctgattcttagacctcccctcagacctacagattaatatccagcacacaaagcccaggaatctgcatttcaacaccccttccttcctatctgtttctcaatagtcttcatgaaggtgttcacggttcatctgagagccaccatgacctagcatggccaagtcaccatgacatgaacatgcctctgacccctccccatcctctctctctatccacttggccccctgtctccctgagtcaccattatctatgctgtcaatgtggcctctctggcctggccttctccacgtgagcctaccttccttgattctattcttatgtcccctcttaggaggtgcagctacatggtggtgtcttgtgctgttctgtggcgctttgttttctttctgctgtgacctgaccctttgtcattcttgagaattcataaggaagtgagctttcaacatgatttcttttctgtcttgaagcggtagacttttccatgaccttgagtttcaaggatgatatttcttgttcctatatgtgctgcaggcatctctacagtttcagccattgtacttgtccttgaaggtccctggaccagggacatatttcagaatttccacattaattatgtgaagttcttttcacctttcttctgaacaaaaatcatctttttttattggttattttatttatttacatttcaaatgttgtttcccttccaggtttcccctccatagacccccatcccatnnnnnnnnnnnnnnnnnnnncccatcccccccccccccgcctctatgagggtgctcccccacccacccacacatccactcctgcctcaccaccctagtatccccctatgctggggcattgattgagcctccacacaattaagggcctcccctcccattgatgccagataaggcatttctctgctacatttgcagctggagccattggtcgatctgtgtgtattctttggttcttgatttagtccctgggagctcgggggtgggggtggggtcctgttagttgatattgttgttctttctatggggttgcaatccccttcagctccttcagtccttcccctaactcttccattggggtccccaagttcagtgtgatggttggctgcgagcatccgcatctgaattgatcaggatctggcagagcctcttggaatagctacactaggctcctgtcagcaagcccttcttggcatcagcaaaagagtctgggtttggagtctgcagatgggctggatccctagatggggaggtctctggatggtctttccctcagtctctactccactctttgtccctgtattttctatagacaaaaacaatgctaggttaaccacaattctgtggttaaactaccattgtggtttgcttttgttgcccataggctggaaaatgtcttcaggaattgcagatttttgcacatagcagttttgagcctccaaccttgtttctctcacaccaggggcctatgttcttgatcttgggccctttgaggtctcccatggcctgaagctctctcatttctgagtatatttgagacttttatgggctttcttctcttgtctgctcctctggcctggtcactgggtgggtgacttgttctcagctcaggttctcatgtctgccagcctcttgatcttgttttaaaatgaatggtagtgaactaggcatggtggcacatacctttaatcctagcactttggaggatgaggcagatggggctctatgaatacagcctggtctacatagtgagttccagatcagccagagctacaacactgagaccctgtcttaaataaaaataaaagtaaaataaaaattaaaattaaaaaatggtaacactggtataaaccccaggagccttgtacttgagttggtaagtctggaagctgagggaggccacagaagcatgtggctgatcactgtcacagtgcactctggggatttgctagttgccatgtttaaatgccatccctattgaccctacttgtgttctcacatgcacaactgtataactgtaggtggggctctctgactctgacggtgagacttatgggtcaaactgtgataaaggggcgaggattgtatgtgagggccaggaggaatggaggtcccgaggcttgccaggaatgaaagagagctgcgtcataccacagccttttgtattgtagaaaaagtaaaaccagtaagggtacatgaattcatgtgtgtttacagtgtggacatattagcaagcatgtggcgaggagtaatcctatcatcaagcttttatgatggctatagttgatataatttactgccaacagtggaccagcttcgagtgtacagtctagtggtgtgggttgtagtatcatcatcacaaatatgtgtgagtgttactactgtctgataccagaccactctgatggtgtcctgtgcccagtagtacctgctcacctctgcccacagtgatgatggcgtcacttcctgtttccctggacattatttaaagatgatcagggaacaaagatggaatctgaactggtgccaaacacttagtgagcatccagtaaatactaactgtcccttcttgtcatgggtgcccatattctggagtagctgcatggaccaagtgagaaaggatgctctgagaaaagccagaagtaccatggctcccagaatggctgggtttagactccacttttcattgattttcaggtctcttacctatgtcaagttagagcctaaaagatgggaaaaggattgtttttcttttggcagtaaagtgttatttaaattttttatttattttgagagcaagccttactctgtagcccaggttgtctctgtcttcaaactcagtacctacccttttgccagtctcctgagaacatgagccaccatataggctgagaaagcaaaccttttaaagaagtaaaaccacaggagaaagtagatctgcttttttaaaggactggaaatggaggctgaacatgcttgctgacgtatacatgtaccacaaaccaccccagtagctgggtgggcatgggtggctgatgctgcctttgctgtctgctgtagtcagctttccacatccagtcaggtgatggtggctcatgagatcagtactgaagaactgattagtgactgatctggctggcttctggatttagagaaatgggaagtgtcacctgggtgggtatccaagtcctagcctgatgttcccagtcgctgttgtcaggtttccatgttcagacggcatgctgtctgagccaggggtccagttgactgcctcacgcatttctgtgtagattccttcaactttaccctggcagagcagaggatttctctccccagcaggggactgtgcccagggcagccatatttgcagaaaggcgctgactcaggatttgagcccaggcccatgtggcgctaagttctgtgccatctgtattctgctctcacttatgggttgcacagcacctaagtgcctatgtaggacatacagctctgggattgaaacaggtccagggaatcctctcatggactttcgagatagcaggttttacaataattcctccagaaggtcatgcttgctgttatagccagggcttacagataaacagcttctgcctctagtgggtatagctctgcttttctaaaatggaatggcaggagtcaaacttgttcatttcaacacgcacaaatgattttggaaaattaggatgaaaacactaaactaatgcttgccacactccagaggaacagatgtgaaaacctggacatctgtgcacacttccagctgttgtcccccctgcagaaacaccctgcctcattctgtgcacacttccagctgttgtcccctctacacaagcattgcctcgcactgtggtgctgtgcacatttccagctgttgtcccctctacacaagcattgcctcgcactgtggtgctgtgcacacttccagctgctgtcccctctacacaagcattgcctcgcactgtggtgctgtgcacacttccaggtgctgtcctacctaggagcttatgtctcatgctttctgtcatcacatcaaatttctagctgagtttttgctgtggcttgtgaattaaaaaaaaaggagaagaaaacataactgttcttagatatgatggaagagacggtttattgtagatgggtgggagaacatagctagaggcagacatctgggagagtccaaagtggacatgatcctgagtcctataaggagagggagggaaggaaaggagaggagaagagagaggggcaccaggtacaataaccaggagacccaaacagtaagccaaaatagggaaaggaaactgggggatgggcagccttctcctggactggagaagtttaggatgggggttaggatatgccagccagaaggacgagatagcaggtagatactgagggatgctgggagaacctggtggccagtgtcacctgggccatttgtctcaggtctggggacttaacatctgtttaggtataagctgctttagaaatgacacatggagtcattgaggctacctcatcccttctctggtagttgacacttagggacccttatgactgcaagtggagcctagattctaccaagaaacacatacaactggattctgagtgagaagctactttggctagcatgtctttattccagtgaataggtaattattgcagtcaaatggcttttcactagtggggaaagcatagcactgaaatcttcatcagaccccctccaggctgcaccacaccagcaggcagaaatacatctgggaaggatgtggtggcagctctggcctctgtagtcactgctgcccactgagcagctgtggtctctccacagttgcttcagaaagaagctcctctgaccaaggctgagagcagtggtgggtcccactttctgatagacatgttttaaaacatgcctctataatgtttttaaaaattcaaacttttggagagtttggatgtacagtgctcttataccatcattggttagtatcttatactaaccaaaatgttagactgcattccttcatgtcgcaaactttccattgtaaacacatggcctctgaagtgtgccacaagtggcctattagggaccctagggaatgttgactccagagcagggaggacacagtgtggacattggaaagagctgaggttccaagatgggtgcacagagttagggttagggtttggaatcttctaggaatcccccccccttttttgttgagaataaaagccttgactgtcatattcattctctcattctctcattctctctctctctctctctctctctctctctctctctctctctctctctctctctctctcttcattcctagaacattgtagggctctactggctgctcagacagtacctctctactgaagccttcactcattctgatttaattagcatgcttcttccacggaaggaacttgcactgttttccaacaccccagatcaacacttacttcctgatccctgctcagtgccaacctcatgttaccatttaattcattttagtcccttaaacagccccgcatgtctcctgtctaggtgctggttcattagctagcaggggagtgaacactggaaaaccttggccaaaggttacaccggtgagtggaggagcttgaccttgagcctcaagcatctaaccttagcactccgtgcctcagtctccgctcccatctctggccattaggatagcctttgctgcaacagtctgggaacctgtcttggggtcatttatatctcacctatgaaatatgtttctgctctggagcctggaagcatcccagactgtccaccacacagagcctggtctcctctatggccgctggtatactttcttatgtacactacggtattctaggaaactgtccctgggtttaaagggcctcttagtcactctcctcagcagtacggcacactgtgtgcatttggggtcatcgtgtgcttgttcaaaccaagagcaaacctagaaccttatgctgtatgctgcttctatgatgtgcagtctctttaagatgatttagaaagaaacccgatgtattccttggtgcctactagtgagaccagctgagaagttacctgcttcaagtgacttaccacatatgcccccaaaatatttgttgggttgcatgaaggcagcaaactctgcaggggtccttctagttcgaatgacctgctaatgttcaataaacctcagcttttctggactgtgaaaaacagctctggggggcctggagacatggcccagtggttaggagcatgtccattccgtcagaggatgggagtgtaattcccagcactctgtgccagctggctcacaaccatctgtcactctagctttaggccagaacctctgggcatctctctgcgttcatgtgcacatacttacacagagtaaaatagtaaaactcgtgaaacatttcccaggagtggtggttgcatgccttcaatcccagggaggcagaggtctacacagtgttggccaggactatgtagaaacaccctgtctcaaacaacaaacaaacaaacaaacctcaaacctacaaaaccctagttaatgcagtaaatgtctgagtctgctggctcagtgcatgtcatgggggaaggtgattttgatgatttttgtcaggtcattattttttcatttggaatatataattatgcttccgtggaaacacaggtggagactactaactgcagcgagggcaggaagtggagtggtgagtcttcaccggtggatgctgtgcttgacgaagggtagtcagtgacttgtgtctggtgctgtgtgagttgaaacagggtcattgttttgattttctgtgactctgctgaaggtggatgtaggtttcacatgtgatgaagccattaaatacagtactgcattttttctttcttctcactgccctccttcccctcatcctctcccttcctgcttggctaggggtctcaccatgtagacaagactcactgaatgtgtcctccttccttacccaagttctgggttgcagctacttgtcaccatgcctggactactatttgtttctgatttgcctttgtactagtctttttggtgcagtgtgcatttatcagcacaactctgaaagtgtctctggcctgttagacaccagtagctgtgggttttgctcagggcttccttgacactgtaaaagtgatgcaaaacgaggagtgaattgttattgattacattttaggattaagagtgtattgctgctctgagtgggattgtacctgggatcctggcaattggaaggcagagataggtggactgagggagttgatgccagccagagctgcatactagacagaaacaaaacaaataacaacaacaacaaaaccagagagagagggtagaggagagagaaagagaggggagcagcaaatatgaattgttgatcatttgtgtgccttatgttcctaaattcggagctagctcgtgttagcacaaacagaaagaagtgtttcctcctggggtatgtaacagtaagtgtgcggtcatggagaaagagaccaccactttaacaggtaaaattcactcttggtcaagagcagacacagaaacaggaagtgtactcagccaccctttccatatcagaaccaggagatcagactcaggaaagagacgacgcgccagtttctgctctgactgctcaccaatgtttgccgtgttgctcagtgtggacattgaggattcactccacggatggcgcatgaaggctggagagtggcacacatttgcggggctctcagattacctgccgttactctgacttcctttgtgctgttggaagcaccccttccttacacccgtgactttcttgttctctaaaggttcctccccacacatgtctgcctgcagccctgcgtctgtctagcttaactcaggtggtttgcccttttttccttttgtcctccactcttttctgaacagctgctgagatgaacagcctgctcactggggctgcttttctcttaatctctaataagatactcctctcacttctaatttagtcaacaattttttttttaattaatgagactaagagtcccatgagggacccctgatttttccagcattaagatcttatctaactctttgttactgtttcaatttttatatgttcatttctctgtgtgtgtgtgtttatgtctcttctgtatgactctgcactcctcctgctgtgtgggttcaggggatgaactcaggtcagcaggcttggctgtgaagtaccatcactcactgagccatttcacctgctgtcattcttgttctgaggcagtcagtcagtcacctagcctcaactgctctgtggacaaaggtgagcttaactctgaatgtgcttgcctccacctcctgtgtggggattgcaggagtgcaacaactcctgtgtggggattgcaggagtgaaacaactcctgtgtggggattgcaggagtgcaacaactcctgtgtggggattgcaggagtgcaacaactcctgtgtggggattgcaggggtgcaacaactcctgtgtggggattgcaggggtgcaacaactcctgtgtggggattgcaggggtgcaacaactcctgtgtggggattgcaggggtgcaacaactcctgtgtggggattgcaggggtgcttccgccttctgtgcaggggattgcaggggtgcaacactgctggtgtttcccagcttttctaaaccccatttcaaagtgtttgtatctgtatggagtgcaattctgcatgacttagtgtataagaattgagcctgtgtttcaaatcaaggttagaaacacagattcactgttatttagtattctttaatcttattatgcaaaaaaaaagggactccctcacttcctactcccacaaacactctatttgaattttatgttgtactgcttcttttaagagttgcctcagtatctttgaaaagactcaccagctgcctgcactatgatcctaggctcctccatagtcatttggggcagaagtcccagggcatcggcagtcttcagctgccaggcccagaagatctgactgattctcctgtggaggaggaacttggggagagtagcctactttgtcttggcaaagtggggcaatcaactctccagtgtcctgcttgtccacagtttgggcagggcctggtggtgggtgaggtaaagggcagtgttttgcctagggttggctttgctacatttaaagcaagctccaggtggagttcttctgtgcccaccatcttctgtggagaagatctatgagcagctttcaggagttggcatatctctgtgtcacaggaagccttttttaaacattaaatgccatattgagtagctctctgaagagtttgaggatcatcatctactaaagtatatttaaactaaacaagctctgctgctttctattacttgctgtaggcatagctttggagacgtacataggaggctaaacaaagcttctcctgtaaccaagtacgttagtacttagcacggccacagtatagcactgagtacattcaagaattctaccatttataaggcaagtgatccttaacttaaatgtcgtaatcatctttgacagtttacaatgggttagtagtttttattagattaggattttaaagcttattccttttaagtttgagctataaaaataacaccttttgaattgaagctctattagtatcaaactaaaacttttattcatagatacagtctctagggagactggcaactttactgatccttttatactattgtagaatactgagggttcccccccccaccccattatggcttagtttatctaaatcactaagtcttaaagtgaacaaagataaagaagctagacaaatactactgtgatcctgagtagaccttaggaacctataaatcgtacttatcaaacatgtttttacttatctcaactttttagaagcctggtgttgaatagttagcaaagataagggtaaaccagctaggtgtaaaacccaggtgggtatgataggccagagctgagagagggttgccatatggagtgggtccgaagggcatagaggaaagacactttatggcacagagaaggggaagaacagctaagggtcaaggagaaacaaggaggaactctacccagaggaaggagtccaatgtcatagaagctgagaggtgcagcaaagctgcaggacgtagcaggcagctcctaggggtaaggcaaagaagttcaacaagtgtaggcccaggaaagcacaaagaaagatagctcggagtcagagggcacaaagaaaagagtctaggctgctgcagctgggactgcagtcttccagcaggggaaagaactggacagagcaggagaaaaggagatgtctgtgtgggtgcaggcccgaggtgcagcagggcaggagacagagaagcccattggtgcccacgtggagggcatagcagcccagagggaagcagcagctgaagaatcatactctagaatttggaatcaaacctcctgggaggcaggagccaacagaaacaaacgatccatacaaacctcaggagagccagatcagcagcttggctttgagtggaggccagggaagaacaggtgtgtgctgggtgtgcacacagcagctggcctgctcctttgcctcccacacccctcctgctagggctggctccagctctcactttgtaacaaacttacagatccatcaacagtaacttaaagacagaacacagtcaaaaaagtaacagggcgacttgcagtagatcccaaataatactgggatctaggacactgttggtcagctgaattaagattgagcatctaagggattttgaggtcagaattgattgcaaaagtgaatcaatttggatggagcacttaaaggatgccaggtggagaggttggaggttttgtatggaagacaccatgtgccattcccatgaatgaagaaggggaaaatttctgatatagactgaggggttcctaggatccagggaggactgaatgaggaagacacagctgtttagtggatcatcacctcactagactgggggccaaagtctaaaagtccaaggagagacagtgcctggtatcagtaatttcaaataaagccaaaaggtgaaaactgagttaaaaagcaaaacctcacccaagggaaagggtcagaggtgactacctcagcctgcaagagtattagactcagagatcacttactaattgctagctgtagatggagggccaagtgagagaagaaaggtgggttggttgcagtggagatagggaaagcccggaagagagtgggggtgtggtggcaaggcctttaagggacagtggtgacagtggaaatgtgttgcactgtagctgctggcactgagttgctggaggtaggctgtattctggaatgtatgtagttcatttgtgagcacttttgatgactcagtgtgaagttgaggaatacctccctcaggcccacgaagcacacatctgcagctgacctccatctgcactgtcatactggtgttttgggatcgtgctgtggtggctgtaaacatgctaaggcatcagatacgtggcctcatcccacgtggcagcctgttttctctgaagattggattcatctttttcttctgctttgtgttgtttggtgttttgcatattcattatttttgagtttcatgggccttgtctacagggaatcccctgcatttaagcacttcagcttcctgtcaattacttcccgaggcaagccccctgttgtcctctgcgaactttaggaatctacttgtttcaggagtttataccttctcatccaggcttttattttgcctttaaaataaggtttgggaatactgctaccaccaccacctcctccttccttctccctcctccttcctcctccccctgcagtctctctaagtaaccttgtgagcctgaaatgcaggattgcactcctttagactctggaatactgggattgcacagaaggtcattgtggattgaccccaactctctgttttgagtaaggcaacctaactttcactcaatgcagacctacctactattagcttccccacagataagtaccctgtcctgatgaccactctgactgcctttgcccctgtgggctttgatccctgcttgcctctccggctggtgttgtctggctggcactgtgcagcctttcaggagttactccacctgagtcacagtgtgctttggtgtgtgtcatgtactcctatccagggctggaatttccttacttctttactggcctgatgctcagcttccatagtagtttttgttgttttgtttcctctacaactttcccttttctttaggacaaaaataactcacactttaaaggagatgaatttaaattcacatattccttgaatcatcattcactggagccttttctcaagtcactcaagtgttaggtattgctggtcactcctgtggtggctaaggtcatcttaaagttccagaacccagggtgtttcattgtcaccagcggccttgcttctgctggcttcccagctgtcacccacatggtcactgactgcctgaatctcagccatgagtcacatgaagttacaaggcccccaagctctcacttcagctctgcaggctgcttgctccttgttacctgatgctaccctcaggccttggtcccgcctcagtataatcccattatggttagtaggcattcaggacttgcacatctcagcatgtgctggaaatggagcctggtccatgtttgtgaagtatgtcagtgggccttttctctatccagggcggcaccctgtcttgttcttgctttccagacatcactgcagctgctcggctcattcccagcttcttgattatttggtcttcagtacagaaaaggcgctcatggctcagcatgccttgtgcatcaggatcccccagcatggccttgcagcggtgatgtgctggtctcagagactttctcaaggttgctggatgtccatctaaggagcctttacagatagctcttggttctccttgtttattagttactttcctactgctatgataaaacaccatgagcaaagcactttggaaagtgtttgcttgggttgatggtgcagagcgatgatggagtccgtgatagcagggcagaggcacggacacagaaatagttaagagctcaggcctggacctgcacggaggaggcagagtgcactctgggatttgcttgagccttttgggacctcaaagcccatccccggtggccccctgaacaaggtcacacctcgtaatctttccccaaagctcatgcaacttgggaccaaatattcaaactaatgagtctaaggaagccattctcatccatagaccatagcctagggcctggcaccacctctccaggcacactgtcggcaggtaggcaccacctcccagaatacatttgctttttgtttgagaaaatgttcggccactatgaaagttgtatgcatgagcttatgtgctgctgagacatttcttctttcccaaggcttccagcataaggccactctccaactctgtgcagaactccagtaacccttacaccttcagaagaccctaaccatcccttgttttgatgtatgtgtataaaagtaccgtagtgttaacataattactaattgtaatttttttccttattaagacctttctctctggagaaatttggcatatgcacacatatgtacatatatttttttttccccaagacaggctttctctgtatagccctggctgtcttagaattcactctgtagactaggttggcctcgaactcagaaatctgcctgcctctgcctcacaagtgctgggattaaaggcatgcgtctccactgcctggcatgcataaatcttaaataaatgaaatacatctattaaaatgagggagtatcatttctggtgcatggtaaaatacttatctgagtgtctttctcttcctaaagctgtacctagtctctggaacgttgatgcagaagtcacagtccctgaacagaagcctggggaagttgctgaggaactagcaagctcctacgagaggaaactcattgaggtaaggctagccctatttcccatgctgtagttatctggaatgctggctgctctggtataacttaggtgagggctcacctgctgtagcagccagccagctccatagaccagaaaggcgaaacacaaagagataaacccagagtacttggaagagaaggggaagttgattctctggaaaactttacttagctagaaatgcctgagatctgtggcaagtgagtaggagcgagagcgtgaacatgtaacattaaaagcaaaagaacttggtgctggagaggtcgtccactgagagagatcttgctggatgcccctcatgaactgagcctgcatcctagaacacaggtgaaaagaaaagctgggcttggtggcttgcgcttgtagaatagaggcaggaacaagaggaccagaacagcctggctggtaagcaccaggccacggagagaacctgtctcaagagagtatgtccttcctaaaggtgtcatccaagcttatcctggcttccacacacatatgtgcacaggagcagttgaagaaagatgtaaactagtaaagaagagtggcttcagaagaggtggcagaacttgctggtgaccaggaacagtctgatgactccgcacagaggccctgcctgttgcacctccttaaagcatttgcacttataggtgtcttggttcagatgtgtgttccctggtagaagaacccgaccaagataacatacaaagacagacatacatgcagaagtctagagtgatattacccagtcagtcatttgcatgccatctaggtaatgaatggtcatttgataacatttattgagtcagttacgagccttgtgaggtggtggtggtggtggtgtgtgtatgtgtatggtatatgtgtgtgttgtttattgtgtctaataattataattattagaattatatagattatacacatacacacacgtgtgtgtgtgtggtatgttgtgttgtagtgtatgtgtgtgtgtgtatgtatgcaccagtgccaggtaaacatgccaccaaaacatgggtgtcaggaatgcagcacagctacctgtcactgagccacaccctccagctccaggtcaccattttctttgtgcttttttatttggttcctgaaaaagagaaaggcagtgttgacacacgcagcttgagttctaactcaggtgagcttggggaaggcaagctgctgtctgacaaaacagctgttaaggaaggatccgaaaccagggccaggacaactctggtcaaatgcctttcacagcggggtcgtgaaaagggttgtgaaagcaggggcctgtgtgcggtgcagtgagcccagattcctgagtccctctggtactcagaacgccctttgtgaagtgggaacagttctttctcccttagagggttgtgcaaacccacatgggtgttgtattagtcagggctctttagaggaacagacctgattaaatgaaagagtgaatgaatttatcatctgtctttcttaagtaggacttattagagtgacttcaaggctatggttgggctaatctaataatggctgtctactaacggaaaatccaacaatgcagtagttcagtccacaaggctgaatttctcagctggtcttcaggataaaccagaatccagaagtggactccaatgccagtgaaggaatggacttgcaagcagggagagcaagcaggcagagcaagagattcttcctcccatgccctttctgtaggctgccagcaggtgtggcccagatgcaaagagggttttcccacctctaaagatctaaaggtggatcatttcacttcaaatgatttagttaataaaactcccctaagccaggtagtggtggtacatgcctttaatcccagcattcaggagggagaggcaggcagatctctgtgagtttgaggccaacctagtctatagagggagttccaggacagccaagattataaggagaaaccctcttcagaaacaaaacaaaacaaaaataagaaaaaaatccctcaggtgtacctagccacttgagtttcagttagttccaggtgtagtcaagttgacaaccaagaatagctagccttccagtagataccaagtctctgaaggcaaaaagtatgtcctatgtcaggaattttttattggtaagtgataagtgagctttgagggaacatatttttaaattctcccaggactgtgttaatttagtccataaatgaagagtccataatggggaactgggttccaatggaaaaaagggttatcagagagaaagtggatggagtggggtgatcagagtggaactgaggggaggggagctgtggtaaggacctcatggctcgctcgctcgctcactcactgactcactcactcactcccctcccagctctccacaggagcagctcactcgcctcccagctctccttaggatcttgcctcctagctctcagcccaccttgctaagatttcagatagggtttggtgggaccactccttgactggggactgtgtggacacataactctcacactctcctcagagaatagctgtgctttagtactctaaggatgcgcttggggaggtcactgaaacattttgtctccagttctaatggggcctttgtcaccaaccactgtgaccatgttacagtctcccatctctctgtaccagtcttggctgtctgtgcagagatcaggccatggaggaagtttctgttgcatcctattgccttgaacatggcagccgttgaataggtagagctggtggtccaggctaaagctttctcttcctcccttttgtagtttccgtatcaggagcagcagagttgtgggttctggccaatgaactgagctcatgttgggtagaagtaaacaagtcctcaggtcgctcctccctcctttcctgcctccctccctccctccctccctccctcccttgtgtatgtgtgtgttgtgtagatatgtgtgcacatgtgtctttgtttatatgcctgtggaagcaaaactccctactttgatttttttgagataggctctctcactgggctgtgactaatagatttggtgacactggctgacaagtgaaccccaggggctctccattctctctgtcctctgtactgaggttgcaccactacacctctttttgtgtgagttttgggggtcaaactggagtcctcaagcttgtgtggctgttcccagaccctcaactagcattttctatcctgatagctttttttttcttctctgattaggaagggggtgactgctgtctattcctgtggctttagcatgtcttacaccagccttctgctaccttgtgttcacatgagtagagcccttcaggagctctgtgatgctctgtgtttacccagaaagtggtggacactcatggggtggactagagagccagtacagtgggagccagggagctttgccagccaagcatcgttcctttttagcaggatcaagaggagatagtttttattctaatactatgactacttggaggatcccaaacactgtggttcatccagtgtaaagggagctcctgctctcctgctgcccgtctttagaagcatggagtttgtccccattgcatatgtataccacacatttgttcacggtgacctggactccagcccctgggcagctctgggctccagtgagtactggagccatctgttactagtgaggaagcagtcagtgctgaagattgaagtagtaagactgtcccagagctggatgaggttctgtggtcctcagtactgcaaagccaactcaactccaaatgcattccagattgtttctgaaacctgtggtttgaactttggaaactaaatctgatgattaacattgtttgttaacaggatttaagatcacttagtaggcatgtccatgaagaattatatagattagtttaactgaggaggtgtactggctagttttgtgtcaacttgacacaggctggagttatcacagagaaaggagcttcagttggggaaatgcctccatgagatccagcttcgaggcattttctcaattagtgatcaagggggagagggcccattgtgggtggtgccatctctgtgctggtagtcttggctctataagagagcaggctgagcaagccaagggaagcaagccaaagaacatcctgctatggtttctgcatcagctcctgcttcctgacctgcttgagttccagtcgtgatttccttcagtgataaacagcaatgtggaagtgtaagccgaataaaccctttcctccccaacttgcttcttggtcatgatgttttgtccaggaatagaaactaagacaggagggaaggcctgtgttaaacatgggcagtacccttctatgacctggattgaatgaaaaggagaaagtaagctatacaccagcctcatctttctttcctgacacacacacatgctgtctcaggttcctgcatggcttccctgtcatgatgggctgtgagccgtgagctaaaaacaaatccttccttccttaagttgcccttcccaggtattttgtcataggtgacagatttataaagggagggctgtggcagttgtagggtgatccagcaggagaacacatgggggatgtagcatctgactctctggtgtgttctttagcctatagctccaggcagtaagctgagatgtcatgcccatggcttatgcccaccaaagagttacctaaagaaggtccagtgctctgtggttactgatcacagctttgcaaagtcaattggtttgctagatttctcagcaaggaagaagcaggaaaccatgttacaaacctataacctctgcttgtgctctgggaaccggagctcactgaaggaaaaggggtcatgtgacagaacagaagggacactcactgatggcattctagagtgagatgcggggggacttagtacattgtatgacaagcagtggcagctaatggattctgtgcagcattagtgtttgagatgggcctagaggaggatgaggagggggagggatgacattgcaatgcctagctctagaagaaggtgacaatctgtctaacagatattttgtgttattttatgctccagtgacctggagctccttggggttaatgtggacagagcttttctggccatgagtctgttaagtacctcagcttcagcatgcagttggtgctccataaacacataccaacaacagtctactaagtgaatttaggtaccctgtgaaatatgtgtagggtgttaaatgtggagccccagattaggctgatagagaagtcccaaatgtggcctctgatggcagggattagatgtctaataggagcgcatggctcaggagagagcacttgcctggtgtggttgaagccccaggttcaatccccagcatgacaaataaaaagcaaaaagaaagacaaaagacttcagctctgtagaggaggtaggctctcttttgatgctcagggttgagggaagctaagcttagggcccagagcagcaggctcttacacagctttatgagcactgtcttagcagccagcctgtgcctcctcttctgtcctgtcttctggccttccatgcccatgagcctttgatagagctggcagtggtaaagaagaagtcctgatgctccttcagtggcctttactcctctagatggagttctgttttcttcactgcatagtggctttagtggcaaagccatcaaatttcttagatgtagagagagcaggcattcattatcccaagaccaggccaaagattaaggaggtggtgatcctggggaggcttcagggaagagtcatgcactgtctggagcaaggctttaaggcagctcagcagaggttagcacctcactacagctgttttgcatggctcctccctcctcctttggacttccagtaaccgtgctcacaattttctttgtaaaccttcccctctctcttgaagatctgaaacttcagattttttttctcactagaggttttgaagttcaaagacattggatacatctaagactcttacttctttctctcttttaagtaattcctgtggtttcaccgaatctccctagagttggccagtccattttggcttccaggaaatgtaagatgtgggcagcattcagattttgatccttcttcttcttgacattgaattctggagtttggtggcttggaggacacttgatgccacaaagtcagaggagttctgatctaccacttcctgttgggcctcactaagcctcaggctctcagtggagtgtgaccagttgccctccttgagctctactctgggactttagcagagcctggttagggcaagaagaagctctgtgtccttctcatcgtggcctgtgtcttggtagagcagaagttccaagcactctgccctccttttcttcatggatcctgaggtatgcaggagtgcagcctctgttcagcagccagcagcagtgagcactgattcctcagctcatcttagtccctggagatgctgtgctgctcctgggttgccagcactcttctgcttgtagctcctcatctgagccatgtgctttctccttcctcatagcagataagggattctctttgtctcatttgggtataatgtaatacacttgtgatcctagcacctgggaggcggaggcaggaggatcctgagtttgaggccaacctgggttgtatagttgagactctgtctaaaaaatccaaccagagatggaggaggctgctcagatgcctaagtgttggttttgtctttgtggcggcctggaatctgggcctgcctctgaccgggagtctggagtacttaggaaggagtaggcgaacttccacagagacacacttggaagatgatccaaggctcttcttttggacaacagataaaaatattggtaattatagtggctgatttcagctcctcagccctccagtattttgagtctctgttaggtttctccctttatgcaggaagaagcttcctgaagccagagtcgcctggtcttgatggaagaggttcagggctgttctgttggtgctgggcacaccttgggagggatcagggctgttgtgagcaccagataagctggcctttgttttacttgaaaagcctgctgcttgagggtagagcgacaaacttcagagagcagacagctgatgtgactgaggagaccaaggtttgccagccttgtaccgaagtctcttctggctacagtgactcacctgtacctcaaggcatctgaagaccactgatgtgtgtgttagtaaactcttgctgctgccttcagcctcatttctcaccttacctagaacttgtttcatctttcagaagcacatctttgcatgggggttggggcaagctgtctaacttgacaactaacttgattccttttttctgtcttctatccttgactcatctttccttgttaactttacacacacacacacacacacacacacacacacacacacacacacacacaaggcgggtttattgggaagcttctctcagccaggagagttcactggacccaaggactgaggttgggaagttgccatgaggaaagtgggggagggagtgggtcagagagagagagagaaagaaagagaaaaagggcatgcacacagagagaggagatgaagagagagagtaacttattttcttcacctttaagatctcatctgaagagggtgtggtggaaggtgcctgtaattctagcacctagcaggctggggcaggggcaggggcaggggcaggggcaggggcattataaggttgaggctcgcttgggccacttctctgctcttctacaaactgggttcggtccccaggtgtcctcagcatcctttgtatcctacatcctgatcctgatagggcagctttctctgtacttgccttgactgtgttctcattttgccctttccccaagtctgctctgctgcaagcccagcagatggcagtagacgtgccccaatcatcaccattctagctgttctagccctagcatccagcaggacccctggcatctgactggtaacccatttaaacagcattttcgatgaagaccacagggaagctagatcaaactggctgaggcagacacaatacatttatttactaagtcctatttcagttttctccttgggaccatgtgacttgctcaggctactggggtataaatagaactgctgtgcggtccaggctgggggagagatcaactggagaacgaacatttcctggttcttgttttccttgcagggtacctgtgagccatggattctgtgtggcccagccacaagagggcccgagtctgggtccccaggctgctacttagaaggcagccttgctgttttgctgctgggcccactgtaatctttgtaaaaaggaggagtgggatttttatctgtttagccagggaactattggggtacttgttgctgtcctgcttatcttcagtccaggacagtctgattttaggcatgggtaattccccttctgttcatagatggctgtgattcccctgagcaaatcttttcttccaagttcacattcagagaagacaaggctttgcttcttttattcctggccaaagctttgaatttatgctggcaacccagctgagcctccgctcttgctcttcatctgatcacagggtcttgcttctgcactgagacagcggagagccctggtcagatgtggggaacggagaatagggaatgggatgtacttcgaggggaaggaaggatgccatggagactccagcttacgttagctcacagcgaacaagtagtgaacagatgagcgcttagcggtgaacagaccttctcccttgtttttgggactctgctctaccagctgagtactcttcatccaagggtcagtgagtgcagagacgggggcgagggcagtatttgagaccttgccatggaggggaaggtgtgcaggtcctttgcctgtcagcttgggtgggctagggcaattgggctgcaggaagaacatgtgcaagtttggcaacctggcagagatacttagcagtgagacagggatgacacttcagttcctcactagcagcgatgtctgtctctaacattaccttttagtcagcatacagagctgtgttttatcacaccgttgtcagaggtgtgtgtcactacctcgcacacagtcactcctccagactgttcctctgtgcagctttcctctcatctgtttgtaaggctgtagatatgataatgtttcttttctgaacacatgtgcgtgtgcatgtgaatgcgtgtgaagccagacgacaacttcctgtgccatctacctccattgagacctggtctctcactggcttggaggtcaccaataggttagactggctggctctgggacacccctcccccattctatcctctccaacccagggcttacaagcattgcctggagtttcccagagggctcagggatcacactcggcactgcatgcttgcagggagtgcatagactttcctgactgagccatcttcccagacttggttaatacttttctattttcttttcttcttcctgaagatggtatggtgggaagttctccctttgcattctcttctctctgctttagtcctccccaacacaggccagtggggactatgtcccccactacttcctggctgttctctgccacttgatagaatttttttttctagacccagccaactgtttgcttctaaggaaatcttcttaggaagatttcatctgtcagacaaagctggtgatgtcagagcaggatggctgctctctctgggtcctaagagccgtgtggaggtttctgcttgcagagttggcagggtttggcttgggaaatgtctaggaaagtgtggcctcagggtacctgtcacttcagaagtggcccttgatgtgtgatcctcagacttaggcttggcttctgatagcgcagtgcttgtttgttttattgaaggatctaaaaccttctgacatctgcttgtctctcttaccatgagattggcacaaagtgtcgcagcattggtattagtttataaagagcagagagttgacggaccatcccagatgtgtgtgtgtgtgtgtgtgtgtgtgtgtgtgtgtgtgtgtgtgagagagagagagagagagagagagagagtgacatgtgcaacagtagtacacatgtgttcaccagaaacccactcacctctaaatgaatgaatgaatgaatgaatgatctaagcatgaattaaaagtgattgagatctcctacttgccaccacccctcttttaattttttgagacaggggctcactatgtagccatggctgccctagagctcactatgtaaagcatgctggccttgaactaacagagattcacttgcctctgtttcccaagatcagggattaaaggcatgcaccactcacatgccactgagatgccctgctaagtatgtactatgtcagctgtcacagtgggtatgacatttgagctttatacccatgagcacagtgggcttgggaggggtggaaactaaggtttagagtggttgactggatttcaggggtatagccatggagcagtgtggtaacctttgacccagttctgaggtcccaccacaccccagcttatccatgcatttggttttgtaaagctgtcaccataagatgtttgaactctgcttggaggtcaagcttcctgaagtgtgcctgtcttccaccagaagacctttctaaactacgggagattcaggcttggactgggagtggcttttctcagtttattatagagcaaattaatcaaataaattatgtagttcagctaatgacttgctttgatctagtaattttgtaggaagaacaaattgagcgtttttgtttaatccactttgggtgtgtgctagagtggatttaagagcagagcaaagcagcgcatgcctgtaaatcccaagtccactcctccctcaggagctgtgttcatccttctccatacacttgaggtctccggtggactggctggctgcattcaccccgtgcttgtttaccccacgtgtgtttttgagcacttggtgtgtcttgtttgttccttacactctctacacagtactgctccagtccttttatagaggtgacaaagacactctaagccctcaggtgtttaaagctacataagcactcaatggcagaagacaggatcaaagtccagacttgaagctcatagccgttctcctttggaaacatcctgtgtctgataattgctgataattgtattctgtctctgtcacatccaccccgaccaacaggaaagatgcaacaccacgttgtccttcttcaagcaggtttattcaggaacacttcgaattgcaatgcaggaacaggaatctgccgaacaaccccggtgattttcctactagcctcctgtcttttctggagcttccattgatggaggctgctgaagaggcagctgagtctcctggtgttcctgggattgtaagccaaacaagcccttttctcccctgtatagcttcctatcagggtgtttgttatggcaacagaagtggagttagggcagtagctttctactagttatcactgtgttggcctgccatgttgtctgctggtttggtttgagcaattttgtcaaagtcataaaatgggtggcatagagagaacagaaccagtatctcatgaggggaacacagaggtccctttttgaatgttcttagggggcaggggagagagggttcttttgagggccctttgttagggtaaactcttctttataagtgctctgtctttgtgatctgatcactccccagaggccccactcttatcagaacttcagtagaacttcagtgtgggtcagaccacactatgctctgcctgcttgggaacattttgttaggtaaaaccttttaagttatttttactgtttttattgcatgtatgtatgacgtgtgattgccagtgcacgtgtgccattgcatgtgtgtgaaggtcagaggacagcttctaagtggcttctgggtctaactcaggtcattaggcatgtgtggttggttttaactgtcaccttgaatcacaagggaagagggagtctcaagaaaatactttccaggtctgcttggcctgtgggcacatctgtgaggcatcgtcttttttgatgagggacaattaggcccactgcgactagcatcagtccctgggactgggctctggattgcctgagagttgagagggtttgaatctactttctctctgcctttgcctgtagttgagacaagcatcatggtggatctcctgttaccttgatataatgtttactgtaatctgggactgtgagccaaaatagacccgtcctcctttaagttgcttttgacagggtgtcttatcacagcaacagagatggcaagcaccttaccttttgagccattttatttgtgctacataatccctttttaagaagtaccatggagtgtctcagagccacattagagtgagtaactgtaacatgtcatcttaccagtgtgtactttgcagttcaaaagggggctcatgggagagagagagccttaggcatagctgaaggttctgcgtggggcccacaggagcatgttagttctcccacttatctcttatgtgcagttatgtgcttatgtcagatgactttgcaaataaaaattcagactaactggtagcatcggacttctactcctgtacaacaggagctgtctggagccacgacatggccaatgtgagtaccttgaagtttacagatcttagctacccacaccccgattgtctccctcgcctagtctatctgctgttttcagtggcaacagaaatctgaaacactggccttctagaagtgttaggggctacagatagaagtataaataaatgtatgcacacacataaatagaatatgtacatatatacacacatgcatatacataaaattatgtgcagctactggtcatattactattttgccctgactttttgaagctcatcagaattattagctttcagcaggagtagaaaacattttgctaccttcatctatttcctgtctctcacattactatagcaccacacagcaatgttactgtgtaatccagttgtttataaatgatcccagccattcacctgcagtgtctggggagtatgattttgtgagaacattctgaaaatctcagctttattcagaatgttttactcacaaagctgcctagatcatctatttcagccatgtgggttactaatgctccaagaatgagaatataattaaaatacacttaatgctaaaatgcaactgaacataattttatctttgataatttagaaggcagttgagcgtgccatgcctcagggccataattatgaacatcagtaatcttagtgtggcactataaaaagtgtggttatatcagctttctgattatttgaaatctgtggaagtcagagtttacccatgcagtgtatatataggtcttctaagccaccacagaagtggttaatatatgactttatagctgatgagtgtcaaaaatgggaggcaggtggattgcagtgtaaagttcagttctctgaatacttacccctgtgcagagtgatgcagggagaagactgtgcctttcagggtagtgtgaaatagagacatgtagatagataggtatatttttaaaatgtggtgagttctttaggagccaaaaggaagttaggaaacaagtcagtatgccaggaagtagcctctttattgggaagaaagtgtgtggtgacttggggtgaagaaagagccaagaaggtctaaagcagactcagctaagggtataatttttgtcatctctatctttatggtgatgtaggaggtagtggtggtagaattgatgaaaggaagaacggatggagtaaggaaataatggaggaagaaatgatgatagagaagaagatggtagtaatgagatgtagaagaggagatgatgaagatggtattgtggtagagaacaaggtgacggtggagatgagtggtgaggggcatgggtatgaggaagaagagttgatttggagtaataatgagagtgatgcaggggaggtgactgtgatggttgcaggagatggagatgaagtgagaagagacagtgatagaggtgatggtgctggggcaatggaggatggggtggttggggagttagggtaatatgaggtggaggatgaggtgatagagtaggaaatgatggagatcatactgacgtggtgatggaggtgataatgtcagggccaatgcagaaggctgcaggaaggtagtgatgctggtctcagcactgcagagtatttgctcctctggggactgctttcatgtagtactgtctcatgtaatccttgtgctgacctgatcagagtaagtatcatttagtgattgctgctttcatagatgaggaagcaaaggaatgagtaaatcgaaagaacatgctgcagaagataggagtggggtctggggagatggctcagggagtgaagtgcctacaaacagaaggatctgagtttgatccctcaacattcatgtagaagctgggcatagcaggatgtgtgtgtgtcaccatcactgaagaagagacaggagcttttgaccagccagcctagctgaattgatgtggtctgggtttagtacttagagctcctatctcaaaacattaaggtagagagagagtcttagaggaagagacttggcatgcacatgaggactccatgtgtatacatacatgtgcacattcccacatgagcagatacatacacataagaaactggcttttacaagacaggagtgaggaggaaccttgggctggagttagagttccctgcctttatcccaagagcttcagccttgataccctgccccttagacacatttcctgatctccatgtttcatagctgtgccccattcatcctcctttgctgtgatgctctaacagatgatatgcatttcatttgcttcgccatcacgtgtcccactggggcctgccactgcagatgcttgtgtttactgtactcaggcatcctgatggccttccatggcagggccaggggatgagagagcacaggtttctctttcgccacagccttacttagtactgctgtgtggggcatatttgtgctgtcccaaaagctttgctttgttaagaagccatgttttttatttgaaactttagttttgacttgctagcaaactgattttaattcagaaaaataattatcttgtgattcagtttgttcacttgctccattcagtctgctgactgctcatgtgctgctgcttctggtttatttactgcaccgtgtgtgggtgtttatgaatgtgtgcacctcctacatatgaacatgtgcgcctcctacatgcctggcaccttcagaggtcacaagaggacactggatctcctgggattggttgtgagctgtcatatagtgctgggaattgattccaggccctctgcaagagcaagtgcccttaatagctgagccatccctccagctccccacgtgcttctttgtgtggatgacaagatgagggccaccctgggttggacctgtgtgataggaatggagtgggtcaagttgctactctgaaccgttgccagggtgacaggaacctaagcaacacaggtcctcagtcctggaagccatgtttacgtaggagtgaccctgcagtcccctcttctgaatgtattttgaggtttgaggaagaacggtggtgtggagcacacactgcagcccagtgcaggagggactcagtgagactgcagttgccatgagaaggaaaggctttctttacctcattcctggtcttacccaagcatggttagggcaggtgttctggagcagctcacttcctggtggtcaggaagcagagagatggcacctggcttgtggtcctctctctttcctcattccccagcctcttggatggtgcctcctgaacttgagtggaacatactgagaggagtgtaccttgccagtctcctaggtgcctcctaatctgatacattgacattgaagatccacactcagtcacattttctgtatttgaaagttttttggcattctttcttactttctcaaggcgctatatgaaatgttactgtttttactgtcagtcaccctctttgtggttatagccgtttgcttgacttgcttttgacatgggactcatgtgctctctgagaaagaaccattgctatgctgggacagggatggccttttcattattttccctgggtttcaaacaggaaagggcaacatccccacttaacctgggtgaagtcacttgtctctttagtctgtcacagcagagtattggcagctgtaacctgttcaaatgtgaaacagacttgaatgtatttcacagtttgctggattagcagaatcttggaccaaagagtgctacacaggccttgaaatccctgctccgttacagctgatgctgagggtggcaatgtctctgaaagactgctctacacttctgcctctgtatgcctcaggagggattgaaggtaacatctaagtgtaagggtgatagttgccttgggccactgtaagacatggcctctggggacaaaggcaaggaatccatatggcttccccatttcgatccttccctaaagttcctatcttcatatagtaagaacggtcagactcgatggctgagctccccactggattcactgtaagtgccagccacagtatggacaggaattgtctctgagctcatcaaagctttggggtgagagagccatggacacccaagaatatctctgggaccacttgtcccctcagtgggctgcagagctgtatcatgatactggataagactgaagctatgactggtcctagcacagagggagttcccagtcaggcccttcttttctcctcagccttagccttctgcttctgagtggtttacaggcaggctcttctgaagatgggtttcctctgtaagggtgtggggtgtcataaggaaaaggcacccaggccatgccaggtccacattttatcattcagtttgcagctgcatactacctcaagggctgatgccaactgagttttgtcttcaggctgagggattatctacactatgtagctggcaggtgatagcctgggatgtatggtggtactggggaggacatggatgtggtttctgactggttcaggtagtggggggattcctgccacatgtgttttgtgagtgttaagtgaagagtgggcacatgaggtctctgccttataaggactgctctgcagtattttcttgtccttccccccatgtctggtacagagtcacagaccttatgtgtaagcatctgctgtgaaagcatcgagatcaagaaggggtgtggagtttatctgtgggagaatgtggggggacacgtggggtcttgcatctgggaagcctagaggattgtacaactatctcaaggtcagtctgaacagtgttctctcccacaggcctcttgtcaaagcatggtgtagttgaaatgtgttgacatggtttgttgacagtcaaagaaatgacactgtaccccaccagccagcaaagtactgccaccctgagattctctcatggtaaccctcacttcttccatgaccttgaccctggactcctggaccagcagctacctctgctctgagtgttgtttatttggtttaatagtcacttgcctcagccaactacctcgccatggcaacaccctgcaggacgttctgctatgttcccatcagcttgcattcttccaagctccttgctcagcatggcttctgtgacctgtatctactgctgtgtgctgctgtggttggtcactatcttagtcatttccctttagaggcatacagggcattcccaggttcattccaggggctgggatgtgtgtgagccctcttatagggctcagtctgcacccagctcctgcgggttaagtgacacagctcagcactcattgggcccttatagaaaccaactttagtgctcaaagcagacctaaaaggtaggtgatgccgtcattgttgctttatgttgttggcttactctgtgggtgcttggtgatgcctactatgcactggtcactgctctgggtgcctggcagaaacagcagtcataaaaccacattggctccttgagggagttggaggctgctgcagtgcctgtgtgataagggctgctgtagcatgcagagcagtactctggagacaagtccatcctcttcccagctgcagagtcttggcaatgtagacagattgatttatttatttaatgagcaaagagtggcagggagtcatagacttgtgagattatgtaagctgcctgttgtgcctaactccattagaagaccattaagtctgttgcatgcagaaaggagagtgaaccagtgagacacaggtcacgacttgttaggcttgtgggccagacatgcacaacgttaacccatgagaatagttgaagaaccttgatttgaagagagaggggtgacagaaaggtgtcccttggagccattagcagagacagaaactgcattaagagagtttctgcctgatatgattggtatgtcattaacctgaaatcctatgcatgtccttcagctgtttgaccgaagtccctgctctgtgccaggttatggttgctttcctcttctggagctaaacatagaaggcagggacgaagcagcgaggtggtggagctcagtgtagacgtggcaggcagacagtggcttccctgtgctcctagtgtgctctcacagcacagaccatgcttttggaggtgtgtgtgtgtgtgtgtgtgtatgtatatgtgtgtgtgtgtacgtgtgtgtgtgtgtatgtttgtgtgtgcgtgtatgtgtgtgtgcgtgtatgtgtgtgtgagtgtgtgtgcgtgtgtgtatgtttgtgtgtgcgtgtatgtgtgtgtgcgtgtatgtgtgtgtgtgcgtgtatgtgtgtgtgagtgtgtgtgcgtgtgtgtatgtttgtgtgtgcgtgtatgtgtgtgtgcgtgtatgtgtgtgtgtctgagtgtgtgtgtgtgtgtgtgtgtgtatgtagaggaggcatgtaggtccttgtgctcacagatcagtactgggataaccaggaatgttaagcacgtagagttgtgtcttcaaagggggggacgtataacctgttttccacccagaaggctgggagtggagaggatttagagtctggtgaccgttgcactaggcgtgtggcctagaccacaccagatccttccccagacctttatcatgagctcctttttttcggccaatctatagagcccatctttatggaagatatcacatatgtgttacaaagagttagatgcaatcatattttaaactttattgtgaacatggtagtgagttatttttaccaggaaatttttccaccaaatcatgctgtgctttgatattcctaaaataaactacttggggttagactatttttttggtttttgtttgtttgtttgtttgtttgagacaggatttctctgtgcagtcctggctgtcctggaactcactctgtagaccaggctggcctcaaacttagaaatccgcctgcctctgcctcccaagtgatgggattgaaggcgtgtgctaccacgcccagctagactcttgatgtttaaaccagcactggctactgagttgtgttgaagccaaccaccttcttctctctctgggatcgactctgcttcatggtggtcgcacaaatccatgaatgtgttacagtgatgcgtgcactttactgagtgagtccttgtccctctggaacaacttctaaacagatgtctcaaagtgatgacactctaccttcaaaggctgggctagcattccatgcctgggtatttgagagaaaagaaaacaactccatacaaagacccatgtgccagtgattggaacagctttacttgtttgggtttggggaagagacagcgtctctgtatagtacttaaaccttttgccttgactcccaaggtatcacagaaatgggaccctggcaagcagctagttattgtagtagttgttgttgcttttgtattgtttgtattagcctcaaactagaaaatcctgagtagtccacggagtaaatatatgaatgctgatttgtccatatggtggaccactcctcggtaataaaaagcagtggaccattggcacacaccactgcaagatggattgcctaatagttattctgctgatgagttaggcccaaactagtatgtgctgtgtgagaattatagaaaatgcaaactactgtgctgatggaaagcacatcactggttacctgggatgcatcatgggaggatgaaattaccaagagatcttcgaggaagcttcgggagtgatggatgggttcactatcttgattgtgttggtggtttcaaaagcatagacacatcagcacacatcagcagaggctactttgaatatgtgacatccattgtgtgcctgtcacaccacagtgaagctactttcaagagagatgatgaggctgtgactgccttggggatcctgggtattcaggaacagggctccatggaaggagacactcactcagaatcagtagttcagggaaaaataattgtgagcaagcagagcatgctccacagggaagtatgttctttcccagataactcctatggaagtttggggaggtagggaatgagatgagacatccctgggagatcataatccagttatgacttgtaatttagttgaataggacttcctttgaaaagacagttagatgtgaagactggccatataatcaagattgtgggacaccttttatttgaaacccactgaagcattggggagtcgtttctgttttcctgaaatctctgagcatgggaaccttttcagccctgtagctgtaaggaggcatcaagactgctttcaccagattccattgccaagggccggggtagatggccagagaaagccccttgcctttgcttcccattttgtgtgtgtgtgtgtgtgtgtgtgtgtgtgtgtgtgtgtcctgtgtcatcctgacacatcctagggctgttggcttacagctcaggaagcctggggcagtcttcccactgccagtgtaaaggtctgtagcctttaggtctgggctgtagacatcttgaaaaagtattgaagacaacacatacttacatacatttgtctctaatccttcacaggtcttgtttcctgtagcactcctaaatttcctgtatgtttgggtgttgtctgtcttaaattagagtgtgagctttgtggaggcagagactgattatcaactctgtacctaggacaagagccagccaaaagttgggctcatttcagtgagtgtgtttagttgagcttaacacagcttatcattggaatacacacaatgtaggagccatgctttctttgcaaacagctttcagaaggtttaggcaacagggtgggtgagtattctcagtgagatcactaagagacctaggattcagtgtcccctatttctgtttgtttgtttgtttgtttgtgttttgtttttttttaaataactgattgtcacactctactgtcttacatgtaaagtcacaaagagttactagggactctgggaaatgtagtctttaattagtaggcctatgcttggctctagtttaccaagttttattaccctaaagctaaaggaacatgggtggggtggggtggagggcttagctgactccattgctgtgcatatatataagtgaatgaatgtttcctgttctcagccctgttatccctcacgttagcatagcatttaccataatattaatgtcagccttattcatctcagtttctgatgcttctccagggctggcattgaacagatgcctagaggaggttaacaggaaaaatagcagctgaatatcaaggttttttcttctgcctgagccatggtaagagggtctttttggcaaaaattacattcacaagaacatttggcataaatgtacatgcaaatgaaatgtctcaggaggcaggttttgccaggaactaagacccatctctcagggtaggtgagttatgcattgagggagagcctagtgggcacctaattctttaagcttaaggctttgtgttttatgtctccttcaaggtctccctttgttgaaaatcacatggttctgcctggtttggagacttagatgatgtcttcccaaatggtcctattatataaaaacacgtgggcctaataactttcacattagggaaaaatggttctctggatgagtttctacattcagaggatggagatgaaagaggctttgtgagtttgctccaagacattggggctactttgggattcttgtgtctgctgaagaccagatcagacatccaaccttgtgaactgaacagattctggattcctggaccttccattgttgggccagctggactacagcctgtaagccattctactaaatcctctgtctctctgtgtccatctgtctgtccatccatccatcctagatattggtaccagaatagtgtggtattgctgtgacagaccatgttttttttttgttttgtttttttttggggggggtggagtggggtgggtgggaggagtgtggaaggcctttggaacttttggctagaaaattcattgaatattgagagtacagtgaactgttctgtaggagcttaggagataagaatgtggaaagcagtacagatgatggaggcctggcctgtgatgtttcagaaggaagcaaaggctctactggaccttttgtgtgaagaatctgaggtgtctggtcaactggagctgaagaatcaactgtgattaacaagagaccagaaccactaactaaaagcctttgtcttaagcctttgctgggtcaatggatgctgggcaacttggactgaagaatcatctgtgattaagaaaagatcagcatattgagatgaagtcttctagaagtgtttcctcagaatcacggaagttgtacttcagagaggggaaggctgctaagattgtaccgcatgctggcagctgagcttgttaatgtaacactcacccaggtggtactgatcatggagaggggtcatggagagaagctgaggcttagcactgtgtggcaggactggagtccctgaagggagactaggagaggctatttgtgaaggtgttattcagttgctacagaggaccctagcaattttggagataccagtaccatcgaatgatcatgaggaatagcagtagtggtggagtggagccatctggagcccagaagacaagatgtgctctagagggcagagcctgagaagtgaccaagccccttggatgagcacagaagattgtgagtgaatcccagtgagtaactggacattgagttatttataatttagaggttggttttgctttgttcagattgtgactgtgtcctggttctttcctcttgaagtaagaaagtttaattttgattttacaggagtccacagttgagagactttgaatttcaaaagacttcagattttagagagagagtattttttaaagtatttttaaaggctgtgggacttttaaagtttggaatctgtattgtaatgttgatattaatgtgtgatcttgaggaagaataagaaagggaaggctatggattaataacaatatatttgcgtgtcaagttgacaagaggtcagttgtgctggctggttttatgtcaacttgacacaagctaaagtctgaaaggaaagaatctcaattgagaaaatgcctctataagatctagctgtagggcattttcttgattagtgattgatggggacggcccagcccattgtgggtggagccatccatccctgggttggtggtcctgggttctataagagagcaggctgagcaagccatgaattagggaagccagtaagcagcacccgtgtagcttctgcatagctcctgcattagctcctgcatagctcctgcattagcaattgcattagctcctgcattaactcctgcattagcacttgcattagctcctgcattagcacttgcattagcacttgcattagctcctgcattagctcctgcattagcacctgcattagctcctgcattagctcatgcatagctcctgcattagcacttgtattagctcctgcattagctcctgcattagcttctgcattagcttctgcattagctcctgcattagctcctgcattagcactttattagctcctgcattagcacttgtattagctcctgcatagctcctgcattagcttctacattagctcctgcatagctcctgcattagcacttgcattagctcctgcatagctcctgcattagcacttgtattagctcctgcatagctcctgcattagctcctgcatagctcctgcattagctcctgcattagcacttgcattagctcctacattagcacttgcattagctcctgcatagctccttcattagctcctatatgagctcctgtcttaatttccctcagtgatgccatgttacctgaaagttgtaaatcctgtcctctccaggtcgcttttgtttctgtgtgtcatcgcagtagtaataaccctaactaagacacaggtctatggcctggtactttcttaccaggtgggaagaatccttgtacgtgtgagcctggacagtacctagcacatctcttatgctgtgctatttgttccctgaggcaatatcctagtgttactgctgtggttctttttgcaagacttgattgtgtttcatggtgtgaccgaaagcccgagaggcacaggcagtgccagttttattcatttatcccccacacctcacctagggtcagggataggcatttgtctgtctcctgcagttgagacagtgaagtaatagatgctcaggaaaatggtgccactcccatggaatcccttgacagtgccctccagcactatagaagattcttagactcttgtacagctgataaggcaggttcgaaggttactccttaggactcaagtctagcctttggtttctaagctaattattgtcttaacatcaatcacactgctcagttacttcagggagtatctagctagtgaatggagcatgatgtgatttcaaagaaaagacgtagggggtcaggctgggtgtagatttatagtgggggctgagctccatcacccactggctgtgtggttttggtggaggtgctcagccatgctgagtcttggtttccttatctgttgaatattagctgagagtgatgatggctcctccctcctatgttttttgtgagaagtaaatgagtgagtagggtcagtgaggtggttcactgggtataggtgattgccaccaagcctcgtgacctgagtatgattcctgggacccacatgatagaaggagagaaccaactcccacaagttatcctctgacctattcgtgtgtgtgtgtgtgtgtgtgtgtgtgtgtgtgtgtgtgtgtgtatacacgcacgtgcgcacgagtgtcactgtctctgtttctgcctgtgtatctaatgtaaaaataaacaaatgtgccagtggatgtgaaaaggtgaccatgctggtggccatgcaggaggattaaatgagtggatggggtgtaaagagacgagagcaactaagtaggaagcactgctgaaatctgtgcttagaaagcaaaatcagggagctggagagaggctccgtgcctgagaactggttgctcttcctgaggaccttggttcaattcccagtacccacatggcgtgcacaagccagtaagccacactcctccatagcctctgcattagctcctgcctccaggttcctaccacgtgccagttccatcaggagtccaaggggttccagtaccttcacacgggaatacatacaaacaaaagtggcagtgggcataggaaaactcaaatgggcgttttagcatttccctctctgtgagctcgtgagactgaaattctttgattctcattgaaattgttgctttatcaaagggaaagcaagaagatgagtgaaaaacaatggcatctttgtccaaaggggtcgtcagtgagaaaagcctgaacacaggatgtccgtctggaacaccaaactccagaccttccgaatgctccctgtgtggcctctcagttatttatacacaatgcagcattagcaaggcatgtgtctcacttaattactgtggggcgagtgtctgacaagcagtgtggtccctcatttccggcatgtgttttaatcatggatttgtgggtctgtacttattaatctctgctttctgctcttgggaagctgggctggctgctaaagccaccggttatggtgcagagaattaatattggcatcgtaggcttcctgaagcctcctggtgcagagccacaggaacagtgaggagtatagctttattagcctggggtgctgaaggtgcagagtggagagcccctcttcaggctctgttacaagtgctcaattctgttgctctggactggagcaatgagtgaggctgtgctttcagatagactgcttttgtctctcgcttttgtctctctgataattcatatgctgcagtctgacatcaatgtgactgtgtttggagacagggttttttttgtttttttttttgttttgtttttttaaagatttatttattttatttttattatatgtgagtacactgtagctgtcttcagacactctggaagagggcatcagatcttgttacggatggttgtgagccaccatgtggttgctgggatttgaactcaggaccttcggaagagcagtcggtgctcttaaccactgagccatctcaccagccccggagacagggttttaaagaaatgatttcgtttaactcatcatgggaggggggaggtcttaaattcaccacagctggtggcttcataagagggaaaagccaagggatgcagaggaggcagttgaaggtggaggggtctcaggaagagtccactctgtctgtgccttaaccttgggcacccagcctccagagccaagagttttgtaggccacagatctagtaatccagggtttctaaagaagacagtggaggtaggtttggttgattgctcatagtgtgtagaaccttgctctataagattgtcagcattgaagaaaattgatcaataggtatttttgttttcttttgtttgtggcagggtctcaatatgtagcccagatgggccttgaactcacagtcctcctgcctcgcctcctgagtgctgggattataggtgtgtgccaccatatctagcaatggaatttttggcaactgttctgaaccaggtactggggaaaagagggtaaagaactgggccctgctcctaaggaaggtgtatgctgggggcagatggacagttagccagtgcattgctatgtggacagcatggctaagttcatcaggagctggttaaggtttgagctgaccctgtgggttggttgctataggaggcctgacttcccaggtggggatacattaacacattttcagcttcagtgtgttcagcatatgatgggtttgtgaactataaccctattttaagtcatggaccatctgaatgtgctaatgatgaatttctcactcttccttttagaatgttctgaagcaactactgtatgccagacacttacttattctaagattccctttcaaggatcctatctagaaaactagactgatatgaagaaaccatgcaggacaattctttccaaatgctcagattcttgatgtaaccagggctatgtccaatttctttagataaaaaggctactggaatttttggcaatgctgtacacattagcaataacaggtgcatgcagagtcccgtggcagctattcagtatttacaagggagaacaggaaaagcaacagttgtttgttctcttccctgcatctgtgcctctgccatgccagaagcaaaggagcaggactggattcggtcggttctcagcttgcagcaatgtgggatccccctacttcttctgctaggacacagactctcctccctcagtccattgtgtaatctgctatagcagtaagtatagcacaacaaaacagtgaaacagttgccttgggacagatgcagaaaaacaccgacccacccaaacttgactgattcgtctgtgtgaaatgtgccattggctgacagttgaccccagtctgcaggtctgccctagtggaagaaaggatggggaccattccagcccaagttcttgaagcccttagggaatttccaagtctgagtgtgtgttaaggtgtcacaaggcatctatttgcatattatcaactgttttaatttgacagagaaactctgctgaagaggaatgattggaaagccagtacacagtaatcaggaagggtttgcttcataaaaatgagttaaatacattctggtagctcttctttgaaggttaattctgatactgactgttaggaaaaagcctaattaataataacaggaaaaacctgcatttaagtaacaccaaggttgtgacaggctcatacaagacccagaattcagtgtgaaggtttagacttgatcttccagcctgtggcccattgttcccgggtgctgaagcagataaaacacattaattaaatatttggaaggaaccttctggttcttcttatttattatcttatgtgaggttgacatcttggcagtttccgagtacagaagaattagatttgcttttttaaaaaaaatcagtgtgattgtattctaatttaatttttgtattttttttccctttctcgtctgtctgggtataggagcagtcagggtgggcaagcctggaaaagttgggcaggagtgagtgaggctgggaaccttcttgtcaagggccactcagtagtgtgtgggcatctgttctcaattgtctcggaggtgtgctccacattcaggcaaggtgtgtttgcctgtaactttagtactcaggatgcagaggcaggaggattccatggccaacaggggacatgattgagatccttcttcagaaaaacaaataaacaaaaaatccaaatcagtcggctctccctctgtccttccatccatccatccatccatccatccatccatccatccatctatccatccatccatccatctgtctgctttcccatctgtctgtccctcccttctgccttccctctcttccttctgtatatgtaggcatgcatgtgtgttttgtgtatgtggacagaggtcagtgttgagtatctttctcaatcactctgtaccttactttttgacacacagtccctcactacactgacttggctgggttggctgggcttacaggtgctggggttacaagcctgccactgtgtctcactttgtagtactagggatggagctcaggtgcctgtgtggcagtcacctcagtgactgagcctctttatcttcaaaatgccgtcctttaccaaacaaggcagcgggcagctggcattaggagggctaaggcagctttctgccttatgtatctcatgacttgatgcctttcattgttctttctttctgaacattttttcttttatatatatttataattgtatgtgtgtctgtctatctctctctgtgtggtctctgtgtgtgtctcgtgcatgcatgtgtcagtgtctatgtgcatgtgtgtgtgtgtgcatacttgtgcatgctatgatgtgaatgaggaagtcaggacaagatgacttgcagaaattggttctctgtatttcagagatggaatgcattggcagcaagtgcccttacccactgacccatttgctattcactgaagcctttcttgaataactgtggtcagacctatcccctgggcatcctccaagtctgaggacatttctgtcacaactctgctgatcttgtattttcatctgtgtgtctccctcttttggctggacttcttaacattttcagaaacttttttacaatgactgaagtaaaaaggtggagttggttggctcacataacatacaattttgagagttggcatagctgtagctcagtgctaaaatggtgcatggtctggatactattcctgattctcctaccttctctttctgtcttcctcttgcaggcttctcattctgtgacactggcagctccaggcttccttcctagcagcctagcatctccttcagaggcctggaatgcagtctgtaattaaccctccttttgctattatagcaaaaatatccaagtcaggctaaaaaaatatatttagtacatgcttttggtgaagtttctggtgagcatcccttctggctacatcacctcatggcagaaatttaaaataaataaatagataaataaataaataaataaataaataaaaaagagcaaggagacaagcttactctcccaacttctagttctcatgaagcttgggctctatgaaagctaccttaatcctcctgagggtagcttccccagtgacacaaacacaagcaggcctcacctcttaaaggttttcacatagcctctatgctgtcatgttttcttggatgacaaaccacacccataccatggtagagatgcagttccacgttcttggggctgggtggggtccaggcagacaaccctggggctgtgcacgctaaagtacatccaggttctttgaaccaagtctttgtgttggttgattttaaccataaacttgccacacctcaaatcacctgggaagtgagtcttaattctaatttatctagatcagattggcctgtgggcatgtcttacagggttgtcttggttggttgaggtggaagacctaccctgaatatgggcagcaccatttcatggactggcccctcagctgtggaggagtgaggcaagctagccaagcatgagcaagcagagtaggtgtattttctctctgctcttgactgtggacatgatatgactggccatctcagtctcatgcctcagtgactccttacaataaaccctttcctctccaaagttgcttttgggcaggatattcagctctacatggctgaaagggctttgcttgctcttctgggttttcttgtgctagtgccttgcataatatttgtctaaagcaacctgggactcagtagaaatattcggtcaagataatttaggctctcattttgacctggtcccactaatggcttttgcctctttcaagaatgtcacatgaatggagagtgatctgtgctccctgctccaagtcctctgcagtaaacaggagcatgtgtaattatcatctcctgtacatgttgcatgctgaatgcatctgtcttatttgtgttttggtctctgctggcccatggttctgctggcccatagaagcatgtgttaggtcactgaggatgtgtttgtaaacatatgaaatgtccctttgctttttacccagtggtgttggacttaatacatttgtccgagcaatctgtgtttgtgtgtgtgcacacacgcgtgtgcacgcacctgtatgcatgagggttattcatgtgcaggtatgtacatgccccagcacatacatggaaatcagagggccacagttgattcagttcttgccttctagctgtagttcaccctgtccatgtgcttctgaggatccttctgtctctgcatctgccctcccacaccactgctgggattccagatgtttgtgttaccccactaggcttcagaccatagttttaatgcttgcatccatactgagtctagttcctcattcttccttttgacccaaaggccttttccttcagggatccacatgtcttgcagttgtttactgtcaccttgtttgccgctgcctgtattgggcacagtgctgggaggtgggggcgataccaggcagtgtcttggtagacgtgggttttagtgttttcgtctgtgaaatggatggcagaaggactgttgcagagagttgttttgagcatttgataacctggcagaggcctgatttccctggttattgcagaaagttctgtagtgtgctgtagctgtgacttggtacctgatactgtgaacagggaatagtggccccttgtggcccagggcagtaactcatcttcaatcacctagccttggaagtgcccaggagcagcaagtctgtgggccagggttgcaggtgggtactggggtcaccatcttccagaatatgtggaagccaggtcccagagagtttcagtggttgcttaaggaagcatcctggcaggtaccagagcctggtatcctacctcagaacctcggggtttgcccagcacatagtccaggagtcttagaatctgttgcaagcaaaaggctggtagcagcaccccaccctccaggaagtcactgaaactgtgtggacttgtccactctctcaggcaatatagtccagctgacaagagagcatgggtcagtgtcatattcacatggaaatgatcttgccactccagttccctaggggctaaagtccgatatagaacacagctgttgcttcacccacgctggccttctttccacactactgtgcttcctatttcctggtcagccatgagaaaattctagaaacagcaatttcaataagaattctaaagtaatctttgcagaaactctacctccttataaattaacctttattatatttgtatatttacagaataaagataagtttagttctatcctgtgtttcaggtaccggaagaaaagttctagaacacacccccttccacctttatggagggggattacaagaaactacagtgaaatattagctacttttcttctctctctgtgtgtgtttctctctgtctctctgtctttgtctcccttcccttcccttcccttcccttccccttccccttcccttcccttttcaagacaaggtttctctgtgtagccctgactgccctagaactctctgagtagatcagtttggatatgaactcagagatctacctgcctctctctcctgagtgctgggtttgaatatgtgcaccaccacctcctagccatttgttgcttttttgctattgttaatcatagattgctactatattcaccttagatcaaaaaacaaaaaataaggggaaggtggagcttgggtcctgagagtatgttgtgcaagttttcatgtgtgcctgtgtgtatgtgcaggcctatacatgtgcttatgcatgtcagcttatggaccagcaggaacacctctgcatgaaacttggtcatttcacacagatttttgagcaaattaacatttggatctagcggggattgttcatttagtagtcatgcctgccaggaaagtcatgttaaagcagttttatgagtaatagctaaaaatgtgttacactcttatctttttccctattaaagcgacggttctaaattcttctctgttctgatagtatttgagatcacgtccagaaagtgtgccaaggacctggagtttggtagggtgttggggggctgtctaaggccctttggcaggtgcccctggtccttatcagccccaacctgaagtcctcctgccaggtttgcctgcatcccagatcccagcctttctaaggatggacgctcagtcctcctccctgcctgctctcggctgaccatgttcccacctttatttctctggcgtctgtggtgccctgactcatcttcatgactcgcgtgtcctctcacactctcctggatttcttttgctcttctttcttcttttcccatcacctcagctcttcgaacttcacccccacttttgctctcgttttgggtcacctttcagaccctgatggtcagtctgttcacatgtctagcatgtaaacacatgtaaaagtctttctagtttgctagacttatgcaagaggaaggaagagggagatgacccttctgtacctgtagattctgggagcaggctttgctaaaatggctcattcttcacttctctgagcatggtgacagaattgtccctgttcaagagaagaaaaacccctccttccagtctgggctggagctctgagcagaccttggttccaaactctgcagccagtcccacaacacccggaggaagctccacccaagatcccaggatctcaggatcccaggatcccaggggcttggtcacaccaggatctcagggtcccagaggcagctttatttccaggagctctgacacaagcaggatctcaggatcacaggatcacagagtcagctggactctgaggagttctgacacaaccaggatcccaagaaggacaggctccagtcagatatagccagggaaggtagccctagagataaccagatggcaggaggcaagcataagaacataagcaacagaaaccaaggttatttggcatcatcagaacccaattctcccaccatatcaaatcctagatacaccatcacactggaaaagcaatatttggatctaaaatcacttctcatgatgatgatagaggactttaagaaggacataaataactcccttaaaaaatacagaagaacacaggtaaacagcttgaagcccttaaataggaaactcaaaatttccttaaagaattacaggaaaacacactcaaacaggtgaaggaaatgaacaaaccatccaagatctaaaaatggaattagaaacaataaagaaatcacaaagggagacagccctggagttagaaaatctaggaaagagaccaggagtcatagatgcaagcatcaccaacagaatacaaaagatagaagagagaatctcaggtacagaagttaccatagaaaacatttttggggtagcattggaaatgtaaatgaagaaattacctaattaaaaaaataataaaataaaataaatagatactgtctcttagttagaggtttactgctgtgaacagacaccatgaccaaggcaagtcttataaaaaacaacatttaattgggctggtttacaggttcagagattcagtccattatcatcaaggtgggagcatggcagtaactaggcaggcatggcgcaggcagagctgagagttctatgtcttcatccaaaggctgctagtggaagactgacttccaggcaactagagtgaggatcttatacccacacccacagagacacacccattccaaccaggtcacacctattccaacaaggccacaccttcagatggtgccactccctggtccaaggatatagaaaccatcacagatattaagaaagaaagaaagaaagaaagaaagaaagaaagaatttctaattaggatttaaaccccagtcattcagggcagttcataggaagacacctttgactttagggcctagagtcttctacattgtaccgggagtcatttcttttggaagaaagaaaacattgacactacagtcaaagaaaatgcaaaaagatcctaacccaaaacatccaggaaatcaaggacacaatgagaagaccagtcctaaggataataggtacagaagattcccaacataaagggccagtaatatcttcaacaagattataaaagaaaacttcccttacctaaagaaagagatgcccatcaacatacaagaagcccacaaccctatagaactccagatagactggaccagaaaagaaattcctcctgacacataataatcaaaacacccaatgcactaaacaaagaaagaatattaaaagcagtaagagaaaaaggtcaagtaacatacaaaggcagacctatcagaattacatcagacttctcaccagagactatgaaaactagaagatcctgggcagatgttatacagaccctaagagaacacaaatgctagcccaggcgactatacccagcaaaactctcaattaacatagatggagaaaccaagatattctatgaaaaaacaaaatttacaccataactttccataaatccagccctacaaaggataatagatagaaaacaccaatacaagaagggaaactataccctagaaaaagcaagaaataatcttctttcaacaaaccaaaaagaagatagccacacaaacataattccacctctaacaacaaaaataacaggaagtaacaatcacttttccttaatatttcttaacatcagtggacttagctccccaataaaaatacatagactaacagattggatgcgtaaataggacccagcattttgctgcatacaggaagcacaactcagtgacaaaaacagacaccacctcagaggaaaaggttagaaaacagtttttcaagcaaatagccccaagaaacaagctggagtagccattctaatatagaacaaagttgactcaatagaaacaaatgtataaatgttggggtcttggacagatacacttagcatttaaaatgagcagaatacttagaaacacttatctaggactaattggctattcgtggtcttttgttgttctgtatcaaattgaggattttttttttctatttatgtgaagaatgagatgaggatgttgattgtgatttcattgaatgagtaaattgttttggttaggaaggtcttttttcacaatgtaaattctaccaagctatatgcttgttaggtcttcaaattctaacatgtttcttaatctctttcttcacacatttaaagttttcattgtagagggctttcttttcttttcttttttttacctcttttgttatgtatactctaaatattttatttgagaaactgagaagaggtgtccatgatgtctttctcagcctgcttgttacttatgtattaagactggtaaattttagccgggcagtggtggcacatgcctttaatcccagcacttgggaggcagaggcaggtggatttctgattttgaggctagcctggtctacagagtgagttccaggacagccaggactacacagagaaaccctgcctcgaaaaaacaaaaaacaaaaacaaaaacaaaacaaaagactggtaaattttgtaagtcaattatgtatcataacactttgctgaaattattgaaaatttgtacaatttttctagtcaaattttggaaacattgcatataaaataatataatcttcaattgaaaataatttgacttaatattttcccatttgtatcccttttcttgccttactgcttcagctatagcttcaatcacattatggatgagcagtagggatagtgggcagtcctctcccatccttgattttaatggggcttattcatgattttattcatttacgatgatactggccatgtatttgtcatatataacctttactatattggaatgtttcctacagtcctatttgttctagggcttttattaatagggtatgttgaatcttatcaaagactttttcttcctttcttttctttttttttgtgcttccattgagatgatcatatgattcttgtatttttttgtccatgtatttggttcattacatttatttcttatatatgtttaaaaaacaaaacagtaggaaaataaagaaagaaaaacccaaggttctgagagatgagatcatgtgattgagaatatctggccagaagttagcatgtaaattttgagttcactgtctcttgctcattctgtcactagtgtgccgatgggtccagtgcttttgggcagtagccacaaagaaagggtcatcacggtgcttctttttgctctcctaggctcccacttggcttctgtagtcctgtcttggaacatgtggctttgtagggctctttccccaggcaggagctaaggttgctccgggaccattgtccacatctctttcagaccccaatcgtgggggtgggaggtgctcagtggcagtgtctgcagcgctgcctggctggtgaagtgatgtagggaagagtgggctttgcctaggacagtgataagcacagctgccaagccagacacatccagtttttgtgtattttccttgtttcataaatgtcccttcatgtggcttgcttttcctctccgtaggtattgggcgtatttatgaaacactggggtggtttaatttttggatagcttcataagagaaatgctggttcatctcttagctctgagcacactttagaagctgcacctctgaagccacatactctaggggtgtgggtcttaagacaagtgcagagccagatgttgactatctggaatggtgttaggtggagtgttttagagcagagacacagatgaactgttacagccaagccaatggcagctgacatttgctgatggagagacattggggcagggagcatgaacatggacatggctttgacaagctctgcctgtatacatggggcccatttcaggggagaaaatcatagtggaccacatgggatgtttcctgtgtgacaggcacagagctgtctacctccagggatcatctcagtcccaatttataaagcagacaggtgaaaggatgactctaactttaccatcaatttagcccttaggatgtggtggaaatgagttccagatagcccatggatctcctttatttggctcatgagtttttagtattgggtttattgccagtgtcaaacaatcagggcatttctgacaaagttcatcgttgataaattctcttggaaacatcggcagctcctgcaggtccatgcctacctgagactgagtattggctgctccgtgtccatgagatcccacctcccacctgacatactctttcacttacttttcctgcaggtgtcccaagccatctctggcccccttgtttcacattaccacccgtttagttgttttataaccatgaggtctcttatttgatttcatagggaaatgtttgcacataccatccattcagaaagaagcctactatgataggtcaacttcttgtgggagaggggctcctgagaatgtctgtgagggattatcttgatgacatttattgatgtgggaagacgtgtcttaactttgagtcagatctggttgtataagaggggtgatggtggatgggtggggctaagtcctagcatgtgtacattagtttgttaatctttgctcttgtctgtggatagaatacaattgttgtagagattacttaatccctacctggggtttctacattgcttttgaccctttaattcccagataaaagacacacaattagccttaagtagcacaagagctgggcagatatctaccctctatgctattagaacctactttcctattgattaccctgaattattacttactatgtttcatttgggctgctcttaactccaattggccagccctcaggggcactttttctttactcctaacccatggtagcttctccttcctcttcctgtcttcttcttcccctaatgctcctcttctacccaccccaagtttgggaagcctaagaccacctatgtctcttctgcccaactattggctgtaggtatttttatttaccagtcagaaataatttgggcagggtcacttagcatctatgtgcagactctcttgtctcttggacaaccagtcttggggacccaatattaacattggaatataagcagcatcaggccaactactacatacaattagctgcttctggtccctgacactttgactgtcccacactaatctggaatttaggtcacctctgttagggtgttcatcagagcaacaggaaacaaaactaaaacacctccatgaagagtgctatgaaggaacagtggcagttgattcattgctgttcctgtaggaaatgacaaattacagcaggggataagcaggccaacactcagctgtagccagactttgtctgctttgtgtgttcttttgtcttctacccttctcttcccccttttccaccctttcaagctcctaacactagataggagagagagaaatggagagggggacagggggcaaagttattgttagattacttcctgctgactaggggcattatgttccttggagcaagtttgatcttctgttgtcaagatatctaatttcttcttctttgttcatgactatttaacaaatgatgaccaacaaaaccaattatgttagcaacaacaactagcaacaacaacttgcctctcagagccccagcatttatataccctctgaaaagtatccagaattccaaacatcaccacacagaaagtatctgcagctggcaaagtcacacccctgctagaacatgaggcaaatcatagtcagttgctgtggacaatctgaagcagtcccacatctctacccctgggataaaaatgaaaacatattcctatatttctgtgtttaccaaagaaaacagaattctccaattgtcactgaactgggtggtacttcctgtggtacatgctagggacctacctccagagaggctgtccatcgtcttgctgtcattttaggtgacatatggtgacatctttggaggctttagacctgcaagggggtgattctggctcctgaaatatcccaaatatatctaactcaccagtggagataaagccccacaggagtacaacctgctcaagcctgccctgtttggtactggtagggttagtacttggacccaggcaacttgggctgcctgcttctgccctcccctgttggtctgtgacagacattcacaaagacagtttgtaggctctgtgtgtgcaacagtgggctaaccctggatgtctttaagaaaccattaactaacagagaaagtgagaataccatttagacagggagaaaaccataatatttacattctgaataaaatcaaatcatctctacagacccaaaggcagtgcttgctctcagagtagctagcatgagtcaaaattgcttcagctttcagggagaaagttttggtgtgcagcttattgtgacatgggcaaagccaaggtattgaaaatagagcctctgcccagcctcctgacagcacagaacctgaaataaatctgactgtagagtacttcttggcaggaattaaaaaggaaaagaaaaagctcttgtagcaggtggcacaaaggctctcgcctgccctgcatctgtgaggttgctgggcctgctggcttccactggtgccttttgtgttgtcataaaaccaattccttaaaatcctgtcccctctgagaacagtaataggaatgacatgttatctttgtccagggttagcatttagagtgtgacatttgcacctgtttgtgtgcttctcagagacagcaggcattatttgttctcccatcttagagaaaggccaggggtgctttcctgcctggctgtgaggatatctgtgctgcctgaggacagcagccagagtcagctttacctttttaaccacctcagccgcaggtgcttaaccccttgctcacagaggacacaccgactgtgtcacctgtccagtgtcatccacctgataatgatggagctgacatgcaaagtgaggtttgccttccatgtcgcactcacctcaccccgaagttgctgtatggaggttttatatgtttgtttttgagccagagtttctctgtgtagccctggctgtcctagaatttgctccatggaccaggttggccttaaatttagagatccacctgcctctgcttcccaagtgctgggattaaaggtatgtgccaccactgcctagcattcatagggttctttgaaaaacagtttttaactgtgatctttattaaggcacagtacactgtgtgtctgtaaggcacacagcctgatatttgatatacattgtactataagttggtaattttgtggccacattgggaaattgtagagattgggtcaggcactctcaggcttttatagcaatcttccttgtttattttggagacagagtctcatgtaacccagctggctctaaacttctaatcatcctgccccaaaccaccatgcctagattagcagtagtcttgagaaccagggtcttgtgagaaatatcttactctatttcaaagctatgctttcaattgacctggggcttaactaggccccacctcttaaaggcacacatttctcaacatggatccttggagtacaaaagatgtctgaaatgaactaaggaactaatttatcctcaaccttaaaccagaagggtctttctagaatgctcttaaagaagcaacttcaggtaaggtttgacctagaaagtcagaactggtccgggaggcctccttgcttccttcctctctgttctgattccagtgtgctgtcttcctttatgaagctttgcagctacagagctcacggcccttggcagtcctactctgaggaaagggacctttttttttttttccttttagaattcagccaatgacttcattctcatggactttgatatgcctatcctggaaggatgttgtggacttatatgatagatattgaccagaaattaggcatgggatgccctgtcaaaccttatggcagcagacaggagagggtctttccccagaaagcttgtgagaactttcataggggtaaggcaggtctgcctattgtgggatctaatgtcagctggaatgcatttagaattctgggtttgggatatggctcagtgggtagagtgcttgcatagcatgctaaaatccgtgggcttaattctcagcactgcacaaattggatatggtgatgtgtgcctttaatcccagcatttagaaaaatgagacagttgaagttcaaggccaccctggttaccctttcaacacaaggacactgataaatgtgatctagtcaatggaatgatgcagggaagtaccttgctagaggcagagagtgacaaagcattgaagagacacgggcaaaacttttatctcctctcttcacacccatctcttttgtcttatcaaactttactcacaaagcaagctctgggaccctatgtgactgggctggccacatgttcataaagtcatcactgaatgaatgagtctgttcatagctgcttcccctactgacattttcatttattaaatatgtttatcttgtcatgtctgagttcccaggcctttcaaaggcaagagtagtttttgttgtaaggggaaagagttgtaggggacactgcaggaaggtgtgtgataaagttagagactctgtgtgtgtgtgtgggggggaggtatgtgtgggaggtatgtatatgtgtgtggtatgggttggtggtgtgtatatgcgtattttttttttccgagacaagggtttctctgtgcagtcctggctgtcctgggactcactctgtagaccaggctggccttgaactcagaaattcacctgcctctgcctcccaagtgtttttatgtagtgtgtgtgttgtgtacatgtgcatgtgttgtagtatgtgtgtgtgtggtgtggtgtgtgtgagagggtgtctttcgtgtgtgtgtgtgtgtgtatgtttatgtgtgttgtgtgatgtgtatgtgtgtatttatgtgtgttttgtgttgtgtgtatgtagtgtgtgtatgtgtgtgtggtgtgtttgtgtgtttatgtgtgtgtgtagatgagaagtaggcatatgacagaccttccagtgatttctctgttgtaaacccacgtggccatattagcttattgactagcaccagcctcagatctgagcttgacccatgtagattttctctgcctgcagccatccttcctaggcactcaccaatcactttgagaaactctttcctctctttgtagccaagagggacagcttatctggttcagtacactcccctaagtgacaacacctgcccttctcgtaaggaccttggttgaaattgagtatatcttatgtccttcccattctcttctcagcctgggttcagcaccaaagtgtggatgaggcgagaccctttcaagccacacgccatctctaccacctacgtggatctccatttcttttttgacatttgaaaccagaatgctaagcattctctttccacaagttgctttaaagacacgttttattgtggctctgtggctaaatttgcaaagcagcatatgtgtgtattaatctgtcagttctgagtcatgtgctagttctgtccccagaatagatgcctcaggagatagatgcctctttacagcttcccctgacccctgctgacgtgtttgtccaggcttgtctccagcttggataggtttggggagcagatggaccttgctgtcagtctggctggctgtcagtctggctggctgtgtggttcttccttttgggcctcagtttctttgcctatgaaataaggacaagctagatcatcctgcttaaccatgagaggatgaggtaagagtccttggcacagctagtatgggttagctgttctcccagccaggtactaattagatccaactctgcttagcatctgagatcagacatgactcggtgtgtttagagtgtggtgggcaggggttagggtattgctcagtggcagagtatcccacccccagcttgtgtgaggtcctgggatccaccctcagtactaaaaacaagacaaaacctagagattgttgtggctgtcaagtgtgtcagctctttttcctggctggatttggacaccttactagtatgtagcatcccactgaagaccctcctagggttataatttcatgaatggtttctagacatggctgactttaatttcacaaattaaatacttagttcctctatgaagcacgtgtgtgtgtgtgtgtgtgtgtgtgtgtgtgtgtgtgtgtgagtgtgtgtgtaacagacccggcccagactttgtagaaacaagtaagttagtgaatgtgaattggttatctatttctgctgaagatatctgtctaaaaattagtgctttcagatagtatcttactatattgttgacttgtggcagaattgtcaaaccagcatatgtgtggattggtctgggtgtagagtctaatgctagtcctctgtgggcctcaggtttttgctagctactgctcggttccttgacacagaatgactgacaacagagctggctctgttagagtggagaagtggagtgctgttgtgtggagaacagagaataagcaagtgcaagaaggacactccatcccacagtctctaagcaggggcatcccagtgcttttgccattttctcctgtgctagaagcaatgggaaaaggtcctgcccatactccatactcacaagggcagggtatgcacatctggaggtggagaggtcactgtgttgttttagcagaggcttcccccacaggcagggaaaaggtgctctgggtaaacacaacctagtgctgggagagtcttccaaagccagggttttcagggaggtctctctgcagaggacactcagagaagaaagcagatggaatggaacatgaaggtgcagagtcaagggaagaagtagaggagagcagtgtgaacttcagtcaggaagggtagcagggctcaagcctgcatgggagagcctgtagtaatgagattcactgcctattctgtgacagggctgtcctatggggagccgagtgctgtcattgggagttttgctctgtttcatttgtttttctataaggtaggttcttgccatttacccaggctggctttgaacctattgtcctccctccttagcttctggagtgctgggattacaggtgtgtgccactgtgtctggcttgggggtttgcacttatattgagctggagttggtcttgcattggcccaggcactaggagtcatggaagtggacttgacatgagccatttgtatgcagtgtgagggactggctgcccagggttcacagtgagatgagacttggtagatggcagggagctcacagagtgaggagcagggcaaggtgtaagaaggtggtagaagccattctaccgcagaagttgaaggcaggccactcatgtccacgaggaggggatgtgaagaactgtggaggagagggcacggaaagtgacaggtcctttcactggaattctggggacaggtcctctgtggttaaagcttggaatcttgacaagacagaacagcaggtccccttgtccccattatagagaaaagaattagaaattgcctcaggcacatcagggcccctctgagaccctagaattttggtggtatatctctctgatcttaggaaagctcagaaggttcatgacatatttgaaagctcctggttgcctctgctgaaaaacatttcattgtcttgagagctaatcctgtgtataccacatgctcaggctgcccaagtgcctgcatggttggcagctgcttcactgtgcctcttctttatggccactgctatgtttcttctcatctgctctccctcctgtaggctgtgtagctactgtccctagacattcatgtccacagttatagtctcttctttaggactcccatccctccctggcatgaacatcatcatcctcttttacaaagtagaacttcaggtccaggaaattgagctggctgtcctggatctcaaagttgggaatgagggggtgggtccccatgagacccatttgctttcaagtcttgtgtctcttcttttcccacacacttgcttttattcctttttaaaaagtcttagggtctgaatgtgtctctggtgtccattttaagatccccaaagaagagtctgtaggccagtagaaagactgcacaatgggctttatgctttgtgtggcagagcatcctggagacagacaggctaaggagcagagaagcagccatttttccatgttgtgatctttttatgctgcttgcagtgccttgctctccattcattctgtgagtgagttctgagcaccaatggtaccaggcactgcttaagtgtgccacaagcatggtgttgaacacagctgcagccctggtctccacaagaccctgcctcatgggaaacatttttgtagaaagaactacagatagcctgtggcacagctggtatttctcctcttgctttgtgagaaaagggtacttctggtgggtgaagactatttactggatgtagatcattactgggtgtagactgtctcctctactgtgtgtagactatccactgggtgcagactgtccactagatatagatcatcacttggtatggactgcgcactgggtgtagatcatcactgcgtgtaaaccgtgcactgggcatagatcattactgtgtgtagactatctcctgagtgtggactatctactgggtgtagactgtccactagatatagatcatcactgggtatagactgtgcactgggtatagatcatcactgggtataaaccgtgcactgggtgtagatcattactgtgtgtagactatccactgggtgtggactatctactgggtatagactatccactgggtgtaggtcatcactgggtgtagagtatcaatgtgtgtagttctttccctgggtgtagctcccagactaggtgtacgttgttactggatgtagatcttcaactgtgaaggcagccttggagttctgttgactgtctgtgtttagcatttaaaaatacctttaggtcaaatctgtttctgttctgttgtactgttcacatttttaaatgtgaaacctgtaagaatggagcttcaaaatgaggcgggctaaagtctcatgcaatagtcacctttattcagagcatcagacagtttatactctgccggttaagacagtttatactcacctgaataaagtcacaaggacaagccacatgtggcaaaacgtgtttttttccatcgaggcaaatggatataacagcagccagttgtaatgaataatctgaggaaactcactcggatctgctatacctgggaaaggcacaaaaacataagccaagaacaagtccttgttgaaaaaaaaaataactgaggtcacaagacttgtcttgtcttggtgttttctcacaagcactctcaggactctattcttcgaccctattctgtcatattccccccaccttttattttttaatagcaggagatccagagttgttttgatttgaggtgttgtagataaatgtaattgtcatttgatacatgaatatcctataagcaagcaaatattagaacagtgagagcatagtgtgtagtgcttggccaccaagagcagggatccaaactattcatactatttgttacattgttatgctgatcctaaaaacctagagaatggcttgaaaagagacctatatgattagtagctctggtctcttgtagaatgtaaacccatatttgcctttcataggaatataaatgttatgatgtcctatataactaggaagtgatttaaatccgaaggaaaaactaaagcaatcctttctccagatgaatgaatcggtctctcacagcccacagcccattcataaacacagagtcattggtaaaataagttctcccttggtgtgtgaggccttaacatgaccccaagtgggcagactggcttgtgtcctggctggtttggtgagtcaacttgacacaagttagagtcatcagagagggaggagccttagttgagaaaatgccccatgagatctaactgtaaggcatatcctcaattagtgatccataggggagggcccagctcatgatgggtgatgtaatttcctgagctggtggtcctgggttctataatagagcaggctgaacaatccatggtgagcaagccagtaagcagcacccctccatggcctctgcatcagctcctgcatccaggtcccagccctgcttgagttcctgtcctgatttcctccagtgatggactatgatctggaattatagtaagctgaacaaactctttcctcctcaacttggttttggtcatggtgtttcgtccttgcaaaggaaacctgagacagcttgatgtttcctttgccctttatctggaggtttgttatctttctggtgactcccactgtctcctcgtcttctgccactgtccttgatggcctttggctgaaggagccaggaaataatccatagtgtttcagaggatccatctgcaacgacagatgcacaccccttcccagttttcttctggagaataaaaatagtgcaggttactgcatcagcttgcttatttccttctgcgatagagccagggaggttagtgtgtgcacagatctggatttattgcctgaaataatccttcaacataagcagaatctgaaatgatattgaagagtctatgaattaacgataatagatgaagcaaaacagccagttccacctgttgggctgaggaaaaagaagtattaatggattgagtatctgagccatgaatccctcctataccattagtttagccatcaataaaataagtatctgtctgtggaatgggagaaggctggacaatttttatagtgacaaattcagtttatatgagaaaatcctgtagctagctttctagctgggtaattatttcctatctttctgagtgactggcactgccacctgaggccatggtgatttctgtggtctgtggtctgcctttggggacttgtctggttgtgtggtattattgcaggcaggggctgtgtttgtggtttgtgctgttgccagaacctacgtggaagcctgtgatccatgctcctgctgactatagagagcaaggaagttacctttgcagtgacatcagtggttgcagacatatagtcgagacagaggcacacggaaggcttctatgacaaaccctacctcctgcccacctgtccttaaaagtagcagctaagcaggaagctttcgaatttacatggccattagtggcagcaacatggtctcaggcagcggcacacaccactgacagcaacatggtttttggtggtaacacaggctgtggaccaacatagacctcagctccagtagaatcacagacccagacatggcccctggtggcaacatgtagacctcaccatggtttctggtagagatacagaacattggcatcaacagggccctttgctgcagcatgggccattaacaccatcttagcccatggcaacagcacaggccccagacatcaacaagccatcagtggcagcaggacccacagacagccaaggcctcagtggtagcatgtgccatcatcagcatgcatcccagttgtagcaggacctcaggcccagacacttttcatggtagcagcatggaccacagacatggcttcaggcagcagcatagaccatggactcagacatggcccctagtggcagcacagaccactgacatcaacatagttccacctctctccagcgcctatgtaccacttctttgttcctctgtctttttttttttttttttttttttttttttttttttgagacagggtttctctgtgtagccctggctgtcctggaactcactctgtagaccaggctggcctcgaactcagaaatctgcctgcctctgcctcccgagtgctgagattaaagacgtgcgccaccactgcccggctctgttcctctgtctttcccacgtctccactgcaaatttgtttgtcatagcagtgttaaaactgcagtgttactcaatatatattttttgtctaaatatctttacatgcaaatacccatcaccatgagtatagttcaaggtttctgaagcatcatgagtaactatcactgagacttgtcttggctttctgatgttgtccagagtcaggatgatcttgcagctaggcagggtatctggggacaggatccaagtgagctgcagaccacagcactccccaccactctcgatgctggccacctgagaggcatggggcatgactgttgtacttgcagcctgtgggcagtgccatggccctgtatgcttctcctcccagcatggtgagtaatagtggcagctctgtgctgcagcaggcctgcaggctgaggaccagtcatgctatgttcttgctgtgctgtgttcctgtatctttcccatccctcctccctctctgttgcttgccgttctctcaagcacatggctctgttctgccatctttctttccaatatcaggagtccactttttaaaggcatcttcccataggatctgccatctcttcccccccgccccccacttgtttcagggatactgatggttctataggacctccatggttctctcaggttcttcaaagctgctcctaggtccttggctgggtggccgacaccgttttcaatcacaaccatgcttcaggttttcatcttcagtggcgatgatgtgctcccagatctggctatgcagcactgcttccttacagtccagcagctcgtgtatagagtaggtgttggagttgactgttgtgaagtgctggatctgagcctggtgggccctgagctggtcaggccgctgcatgtgaactctttcacagtgctctctgactctgcagatagagtccatcttctacagcatcgagagctgaggatgtagaacagaggagatcaggggtgggcttctctgagggatcagctcagcagggtagtgctttatctctggtgaagtatgcagtggcagggtggccttctgtgaaggaaggatgtacatgctgctgagggtaaggcctgctcagtgcttcagtagataaagcttcagccacatctgtaggccccactgctaggaatatttctgttttgctgatgaaacagaagtttcatgtcttcatgtagacagaaataacagctggtcttgggcacaggacacagtctgcacgtgtcccagatttgaaaccaggcatttgcacttaaattccatgttagctacttggaaacccaccccatcttgcttttctaatgtgacaaccatggagcttgaactgagagagttgtagctactgactgtatttgagctgcgaaagggaaaattgtgctcttgtttccagagccttagttcaagacatgtttatttaatgctaacagcaactctgtcatgtaactctgcacatgctgccaatagctagatgtagaaatcgaggcacacaatggtcacacagcatgtaactgtcagatggggccatccagcttcctgtcaaccctcaaagcagcgtcccttgctgctgcctactcttgaatgtgcacttctgttcctgtgtgcaggtgtttgtgcccacagattacaacttacacgaatacatctaccctctgcccctgaaggaatgagccccttagtggctctgctcagatgtacatgagtgctgtttggtatgaggaaggcattcttaggggagaaaagcagtcttgatgttcataaaagttaatgtttttcatttagtatctctcctttgaaacttaggcctaatttattgagctgtggttgaaatattcaggaggtctgtgtgtattccttccaaagaaatatgattaaaaatgcacccagcctctcccaacttctggaagacagtcaaatatgacaaagagccacatgattttaaagtttagatctttttataaagagcctgggctttccagtgtcctgcaaaattaatgtgtaagcagtcctcgagggtgaaatgttttctagagaagtcctggagctcaggggcatgtacaccttacataactctctgggcctggtaactcattccctagaataataattagtagtcctaggtggacccctacgtgggactggcttctctgaagtcctctctcaaagacttaaaacctgatcagcaggctggagcccatgcctcatagaatgagaccaggcaggaggcatgctggggagtggcctggggttgggcctgtctctgtagggcagctcttgtcctgccctcaaccctcagcttattgtcacatctcctgggcccttccccatactaattgagtgtcttcaatgcttccagaggcctcagagcttctgctgtgcctttggccacactgcatgccagcactctgagtcaggttctgatccactgacatgcagaaccaggcttagcatatattgacttagtagacatttgttgactgaagacaaattcatggctgaataagtgaatgagaagataattccagaatggagcagcatgatacattgggcattgcaccgcaagggagtggatgagaaggggttctgggtcctgctgtgcatgtactcctaagccattagttttgactttcttatgcctctgtaagcttatcctccatacccgttgaatggagctgaaagctagaatgtagatgcccaatgagagaacaacatggctgcttcctaaagcccatcctggtgcttaagttcctcctgtgctgaaagcctttgaaaagtgtcagctatgaggaaatgtcctcggcaatgtgcttcagagtgacagtggtgggggcgggtttacccttggggtggagaagactggagctgagcagctctgagctcagcagctgagccaggcacacagagggacactattagtcaatccacattcaaacttcagaaatccttcagtagtttctttttaatttccttgggctgtacagaagcaatgaggaggcaaggaggaagagggggaggatacattacaattagagaatggttgccgctgaccagatgagggtcctgcatccctgctccttcatctgtgcgtcttcctgcagcgttccccaacaaagctctactcaaattgcagtttatttccctccaagctttttccatccatccattcatccatccatccatccacccacccacccatccatccacccacccatccacccatccacccaccatccatccatccatccacccatccatccatccaccatccatccacccatccatccatcnnnnnnnnnnnnnnnnnnnncccatccatccatccacccccctacccacccatccacccacccatccacccacccacccacccatccaccatccaccatccatccacccacccatccatccatccatccatccaccatccatccatccatccatccatccatcaatccatccatccatccatccatccactatccatcctctccctaatacagttcctgactcctcagtaataatagctgctgggttgtagcatttgctatacgtcaaaaatggcaggctccacagaggctattatgtacatataagatgctgttttgtggcagcccctgaggcctcagacatcatactggattccaatagtgctgctcttgttttacagggcagagatctgaagtctgaaaccacatagggattgctatagtagtggacactaagacagcagtgggcactaagacccatgtctcacaaagcttgccaacagggatagggcactgtgctggtagccagtcatcatgcatgcaggtagacaatgtgcctcctggactgttcacagtcctgatagagagcacagaggtcagccagccacattggccttccttgcttcttagggccttaagcccttacaaagtgtattcttactggaacagttttgggagggtcagtggaggggaagggagagcccttctgttaattcagcacacagtttacttggctccacacaatggtggtaattagaacccattacaagcataaaacaccacattcagccaggcctgtgaaaatgggtcaagaattactttaaaagccttgtctggactttcctttcaaaagctctgccagccattctgggcttgttcacaaagagctactattgatttctaaggatcctgggatggttgtcagctctgcagggcctcatcttcttcccagcacagaaagtcttttcaagcctgaggagcaggtggatcaggaggaggaagggaaaaggcagatgccccctgggcacatctcagctagccccagtcttttaacgggctcatccactgggcaactgacaggcccactctggcatttagctcattctaaagactcatattgaccatccttcaggctctgttacaagtaccatgcatcagctggaagatcggggtaggagggttctaaggtgtttgcccaggtttagtctggcaatgagtgagggagtgaagcagacctgagagaaatagagggcattggtcttacagaaccagggtactgctgggtaacactggtggatgtctatctgaagagtagtgttatggtttgtatatgctcagaccagagagtgacactattagaaggtgtggccctgctggagtaggtgtggccttgttggtgtaggtgtgtcactgtgggtgtgggcgttaagaccctactcctagctgcttagaagccaatattctgcaagcagccttcagatgaagatgcggagttctcagctcctcctgcaccatgcctgcctggatgctgccatgctctcactttgatgataatggactgaacctatgaaactgtaagccagccccagttaaatgttcttataagagttaccttggtcatggtgtctgttcacagcagtaaaatcctaactaaaacaagtagcaatagatagcatttatgaaataaccccttctgtagctttctggaagattaactgattagcaccttgtaagccttctgaaacttgtgttgttatttctgctgttttaaaaacaagactgaacctaaatgagaagaaagtaagttgtccaaggtcacagcaactgaggggagaggatagggtgggtctagttggagctgtggaacggttgtgttgtgagctgtcctggcagtctgtgatgatggtcctttgcttactgcagacccatgcagctgcatggagcctccttcattctcttgaggcaaaaggccctgagctcagcacagggctgaagctcctggctgttttggcttgctttctcttgatcagtttctcagacaccatgatgaaagtaccagttttacctgctatttggatttctggatgcttggattttgcacaccaccaggcataggtgtcctctgggctgaaagagaggctgcttgtccccttttcaagaggcttgcttgtggattccctgtaaggctgcaccatgaagagtgaaggttaacactggggaccctgtggcagcagttcagacaggtagtgacacttactgacacctgtgtcttagtggtctctgtctgtcaagtaaaccatatagctcagatcagacccctcccatttcaattggggtgtaaggagggataaatctgcatttctcagaatggaacctaccaagtaatcatgataacttacttggtcgtgggctattaacctgttccatgaaagacaaacctgcatttcttaccataaaaggggttagttcttaccatacttcaactgtttatgcagctatcactgcaaaggctaccaaggcatgggttcaaatctctgccctgcctcgtctgaccctgacactgaggtgtatcaccttgcagtggtctattctgtacggaatggtggcctaccctgtaggaaggagcactagatgtctaaagcctcctagaggttggaatgcagctctgcaggggcagctggcactggccaggtttattttaactaggctggcaccatgtgctgttcacaaagaactccagttttcccaacagctacggcagacaggaccagaagacacagtgtgtgactttcacctcagatggatcctgaggcatctgagacgcgttcctggttgtcactagaagagcttcagttgctactgaaatttggggcttgtctcgatcttaaccaaaaagtgtctgttttgcacttgaaggagggtaaggcatttccttgaatgtgaggagacagagaacattgtggtatgaaagggaacaccagaggcttttcttacatccataatcctttgtggtttgtcaggtaattacggtgcctctgggatcctcacagatgtaaaagctccctcatagccctgttgtatttgaagatcattatccttcatgctccaacttgaagggaacactcagcttcccgcagctctaaaagtgacatcttccaggctctccccttccctccaaaattcactcccgattcacctggccaagcatccaaggagagagttatgtctcctggacttcaatgctccagcacttaacggccatgccagcaggtacttaacaacatggcagactggctgtgagggctagtgagcctccagactgcagttccagtcccttctgtggtactttccatttgacttcactgacaccttcttcgtgttccttgacttactatacagagggctctcatgttctgggccaaatgctgggcctcaaaagtgctgccatgcctgtgaacaggtgtcttctcacaccagcactgtgggccagttagatggtagtttccattttgtgatggttaccctcaggtgtgtaggtcattctctttgtctgtctgtctgtctgtctgtggagtgacgacttcctatgtttctgcatggctgtggagcagagaggactgccagttagtaagggaccaagtgtgtgtgtgtgtgtgtgtgtgtgtgtgtgagtgtgtgtgtgtgtgtgtttgtgtgtgtgtgagagagagagacagaaagagagggagagaaagggagggagggagggagggaggnnnnnnnnnnnnnnnnnnnnnnnnnnnnnnnnnnnnnnnnnnnnnnnnnnnnnnnnnnnnnnnnnnnnnnnnnnnnnnnnnngcctagtagacacattgggggtatcaaatagcaggtaagggtatgtggtgggactatcagcctgagcggagcaggtgggagggcatctgttctcctaaatccagtcttgtagttccattgtgctgtgatagataccaaagtgctgtctgctagccacactttcaggacatggtgacttcatgggctacttttagttctgtgaccgtgggatctgtttgtgacttacattccttttctgagattctccaagtcctcagaagttgcttctagtttggaaatacttatctgagaatcagtaagttcatgtagccaaggtaaggtataagctgtgtatctgattggttttgtgtaagaatacgctctataaaaattccaagtgagacagaaagcttatgttcaaagattacccttgtaacaatgcacagcatagcttgatggtgaaattattccaatcaagttttctctcttcatttccattggctcctcaccctgccattccccagtgaagaccgagctttgcctgatacagaccactgctgtggctgcaaaagggagccagggtttgtccgctcacagtgaacatactggagccctgtgtgactttatgttggaagcatttatggaaaattgttgcagctctctgactcccactgcaccctaggaaatggcagtgacacctgtccggggcttgcgttcatgggagcgtattagcaagtccatcagcaggggtgcagcagctgtggactccgtgcatgtggacagtctacaggcattattgggagatttgtgtgtgcttcacgtgagagtagcttaagcttttgtgaagaataaggcaagtggggaaattactttccataagcagagaaatgctgagagacttgctgacttctcacccctgctttgctcactgcattgtgtgaaggcatccttggtgccatttgcactttgtatgtcatatctgcggtgaggttggcatgttggggacattggatccacagagcaagcagatggaagcatcaggtgagcagaatgtgttctctcctctgtgtacagacatgtcaaagagtaactaaatactaaaaagcacatcgcggaagtgtttccttctgcacatttgtctttgtaataaaaaagggcatctcccttttcctccttgatgtgagattcacgtcctcacttcagtgcacccaggccttatgttcctcctctaacagtatgcgtattttatgtatcatgttaaatacctgtgacaaatagcctggcatcattatgtatatcctaacatgtagtaaatgctgtgtgagtccacgtttgggaggagtctgctaggaggcagcagtctggccaagtgaggctgcttgcccaggggtcttcctgaagcgttcagggacagcatttcagaacaccctctcatggttcactgaattgcatacttgagtggccttgcattggctacaaacgactttatagcacttctatctttgcttctttgggaaccagccaaatatgttgaataattgagtttggaagcttctatggctcaagcttgaccagctgcatgtggggttggtgtagttttagagcacccagccagggctctaatcttccctccaggaaccaattacacggcctggaacaggctctcgaagctcctgagttcagagctgcttgtggaaggtgggatcaatccatctgcccctcaaagctgtcataagaagctgactaagaacatgggaaagatgttattgtgctgcagacagagtcaatggtgacgagcggtggcgccgctgaggagtgtgcagccacagttaggaaggagctcatttctgttttctcacttgaacccagggacttcgtgaatggagctgcatttattcccattgcaccactagctgggacatcatcatcaccattggttaatttatttttgcactgctaagtattgaactcagggtcttgtacatggcaggcagtcacgctaccacttatctatatgcacccccagccccagcaggaactttatcaacaaacataacttagacaacccttggacaagtgttgttaagggttgaaatggtctaaccataaactgccagactcattcaactcaaggttgcatgccactgctgggtgcacagtgccatggtctctggcaggagggagactgccaggagcaggggctcagcatgggcagggccactcctgaggctgatgatgtcctgcttgcctttccaggtggctgagatgcatggggagctgattgagttcaacgagcgtctacacagggccctggtggccaaggaagccctggtgtcccaaatgaggcaggagctgattgacctccgaggaccggtgagtgctccccaccaggaagcaggtctgagccctgccacttcactctgctctccctgaggctccaccaggcttctgctacccgagttagttcatttctgccggtgtcagtgaccgaggaaggtacaggaagtagacaagcacacacccttgttgcacctgcagactgtatcattagagagtcatgcagttgtatgtgcttgtcatacaggcgcattccatgttccttccacagtgctgtgctctcaactgacttagaccttccactgtgtgtctgtgctctgctgtgtggacagatttctgcagccaggaaacaggcttcgctttgtgttcttgtacccatgcggtctgctgggatggagcttttcattgctcatttttgattgtttttgttaggtagattggtttgaggagcatctgtgtaggacgagtcacaggcaattgtttgttgttgtagggctgacctgtgaattctgggatccctgcctttttttttttttttttttttaactagaggagtactaattgcatctccccagacacccctggttaagaactgcttgatgctttccttggctcagtcattctgtatctgatgagacaacctgtgatcagtcatgtcctttagacgtttactttcatcccaacttggaacatttcaagctgtgatgctgtcaggttggatgctggtccttccatgcatgcccaccatagcttcatcttcattaaacacttcctatgcaaaacagcaagttccaaaggttggcagggaagcagtgagcatgctcaggtctccattgccaagcttggctctcaccagctgccgtcagttctatttcaacataccacttcctgtttcccccttccatattatctgagtcaaacactaagtaagtaatattttatctctgcatcctactgtatatgtcgaaaataagaaaatgctcttctatcttgttttgcagtatctggtggatgtccctgggaggcctgcccttttctgaggggagggcagaggtgggatgggcctggggcacaggggaggtacaggggagagatttggggaggtgatggaggggaaactgcagttgggatataatatacaagagacaaatttaaacaaaagggaaaaccttttagaaataagaaactgtaaatgccatgccaccccacctcttatgtcctaaatcctttacagcagcaagaagcagtattcaaatgtccaactgtctcatttttaataacttcctaaaatccgggatccacatgaggctcacatgttataatttcattgattgcctcttaggttttttcctcacaatttaaaaatggatgtaaaagtacctacctcattccaaccattttagcagacagctcagcagtgtattttcctgtgttgtgcagccgtccccaccatggtgccatgcttctctggagactgactgactctccacctgcaacaaaaccctactcctttcttcttccctcagcctttgctgtccaccatcctgcctttgggaatctggcttttttcttacattttgtctgttgggtcctccctcctctctctctctctctctcccttgcagttgatatacaacactgggttgttcccatcctggagttttatactggcttccctgatgacatcactgaatggtgctgcggctcacccctcccgttttcattttccttaagcggatacttgagcctagatgtgtaagattggtttcgtgtcactgatggtgtgattctggttggactgtttcctgtcagctctcctgcaaactctgctgtctctttattcatccatctcttgttactccctaggccggttattctgtgtctccatcaggttagtggttcctcttcttgatgcttctgtagtgctgtgaataagaaggacagtgagtctcccatgaatagagttccagctttcagggatggctgaagaggggaccatgggcagacaggaagtgagcagtggcccatttcttagaataccctcagtttgaacttaggtagtgttcttgtgtgtcctttatgctgaaagagtagatgactagggtcactgtggacactgttacagagagctactttcacgctcattcttgttgtgaaggatgaagactgtacagattgtaactgctgatctgaggagctggcagtaactgattgcctgtcacttactgcctctcttagggtttttattgctgtgacaagacaccatggccaaagcaactcttataaagtttaattgaggatggcttacagtttcagaggttcagtccattatcatcaaggtgggagcatggcagtgtccaggcacacatgatgcaggaggagctgagagttctacaatttgatctgagggccaccagaagtctggcttcttcaggtagccaggagggtctcttccacattggatggggcagtaggatccctcaaatcctgcctatgcaatgacacacttcctttaacaaggccacacctcctaatagagccacttcccatgggccaagcttattcaaacctccacactgcccaagtgtgatgagcttccttaagtatgcgtgtgtcatttcctccccaccacacctaacagtgctaccagttgtgaccttcatacaacagaagacaagacaggcttacagtgagaaggggcagggctcaatctgatcttagagactggattttatttaacagttggaaatgccaaccttttggactctttaaaaaaaaccaacaaccttatcttacaatgtggattacttttctcctttgttaaaatacctgatggaggagattgctcagtggttaagggtacttattgcttttgaggaggactcagattttgttctcaaaatccacatagtagtttacaaatacccgaagctccagttccagggcatctggtgccttttgacctttgtgggcaacacacatgctcatagtgtacatgcagtcatatagacaaacactcatgcatgtgctcatagtgtgcatgcagtcatatagacaaaacactcatacatgtgctcatagtgtacatgcaatcatacagacaaaacactcatgcatgtgctcatagtgtacatgcaatcatatagacaaacactcatgcatatgctcatagtgtacatgcaatcatacagacaaaacactcatgcatgtgctcatagtgtacatgcaatcatatagacaaaacactcatgcatgtgctcatagtgtacatgcaatcatatagacaaaacactcatgcatgtgctcatagtgtacatgcaatcatatagacaaaacactcatgcatgtgctcatagtgtacatgcaaacatacagacaaacactcatgcatgtgctcatannnnnnnnnnnnnnnnnnnnnnnnnnnnnnnnnnnnnnnnnnnnnnnnnnnnnnnnnnnnnnnnnnnnnnnnnnnnnnnnnnnnnnnnnnnnnnnnnnnnnnnnnnnnnnnnnnnnnnnnnnnnnnnnnnnnnnnnnnnnnnnnnnnnnnnnnnnnnnnnnnnnnnnnnnnnnnnnnnnnnnnnnnnnnnnnnnnnnnnnnnnnnnnnnnnnnnnnnnnnnnnnnnnnnnnnnnnnnnnnnnnnnnnnnnnnnnnnnnnnnnnnnnnnnnnnnnnnnnnnnnnnnnnnnnnnnnnnnnnnnnnnnnnnnnnnnnnnnnnnnnnnnnnnnnnnnnnnnnnnnnnnnnnnnnnnnnnnnnnnnnnnnnnnnnnnnnnnnnnnnnnnnnnnnnnnnnnnnnnnnnnnnnnnnnnnnnnnnnnnnnnnnnnnnnnnnnnnnnnnnnnnnnnnnnnnnnnnnnnnnnnnnnnnnnnnnnnnnnnnnnnnnnnnnnnnnnnnnnnnnnnnnnnnnnnnnnnnnnnnnnntgctcatagtgtacatgcaatcatacagacaaacactcatgcatgtgctcatagtgtacatgcaatcatatagacaaaacactcatacatgtgctcatagtgtacatgcaatcatacagacaaaacactcatgcatgtgctcatagtgtacatgcaatcatatagacaaacactcatgcatattctcatagtgtacatgcaatcatacagacaaaacactcatgcatgtgctcatagtgtacatgcaatcatatagacaaaacactcatgcatgtgctcatagtgtacatgcaatcatatagacaaaacactcatgcatgtgctcatagtgtacatgcaatcatatagacaaaacactcatgcatgtgctcatagtgtacatgcaaacatacagacaaaacactcatgcatgtgcttatagtgtacatgcaatcatatagacaaaacactcatgcatgtgctcatagtgtacatgcaatcatacagacaaacactcatgcatgtgctcatagtgtacatgcaatcatacagacaaacactcatgcatgtgctcatagtgtacatgcaatcatacagacaaacactcatgcatgtgctcatagtgtacatgcaatcatacagacaaacactcatgcatgtgctcatagtgtacatgcaatcatatagacaaacactcatgcatgtgctcatagtgtacatgcaatcatatagacaaacactcatgcatgtgctcatagtgtacatgcaatcatatagacaaaacactcatgcatgtgcattaaaataacaaatctaaaatagcctggatgaagtagctgagagcaggaaagatgttttgtgcctcacagttaaaggggaacggtccatcatggtggcacaggagaggcttatgactggggtagtatgagtttggggcggctgcttgcatgaggtcagtcaggaaggagagaggctgagctataaacctcaagctccctctcccacccagtgacctactctttcctgccagactccatagttcacagcttctccaagtagacggagaccagatgcttccacacatgggcctgggaggctacttcacagtcagaccatagctcttacaaactcaagcatcgtgctgcttcacgcctaccccttcagatcacactcttcaggtcctgctctggcccagcagcctttgatgagccacgttctgggcacagcactttaggtggtgtgcacactcctggactctggtgaggctcaaaggtcccactgtgtacccaggactctgctgaccttctttccttctgccagtgtgcactcaaaggattgttgctgccgctgctgctgcttatttagtttttattttaaaagcttgtaatcttctgtaattgtttttatcacactgcctgttttgccttggagttagaaggggctctttggagaaggcagatgttcctaaaagccgaacagtcttcctatgtgtgaggaggactctgctggaaaaagatgtattagacgaagggcagcacagtaagttgtctttgcttcaggacctcccagagtgctctctgcagacctggccatacagtgttcccagaagttccttctccagggacaggctttctaagaagaattcacagctcttttctgaggaaggcagtggaaaagctctgagagctcctcatgctgcaaatccccaatgcccccacgggcttctcagaggctcctcggcccccggggccccactgagcagcctggcagctaacagatcatctggctcattgtgctctgctcctgctctccctccctctgctgtcttcccttcttccccttccatgccctccctccccctctcttctttattgcttctaagtctgtgtgcttctctccccctacctctgtcttcccatgtctgttcctcttctcctctgttgccatttctctgtttctgtcttctttatcttctgtgtgtgtctcatttcatgctcacctgtctttggctctgccatctgtctctcccctttgtactagtcccctatgccccttcctgtttgtcttcctcctcattgactcctgcttaataaactttcacaggctctgtggtacagcaggaatttctgtttaactgaaaacccatacgcccttcctcttcttgagatttgtttctgtggtatgtgtgtgcatgcatgcgtgtgtgtttgtatgtggtgtgtgtggtatatatgtgcatatgtgtgtgtgtgtttgtatgtggtgtgtttttgtgtgtggtgtgtgtacatttgtgtctgtggagtgtttgtatgtgtgtgtgtgtgtgtgtgtgtgtgtgtgtgtgtgnnnnnnnnnnnnnnnnnnnnnnnnnnnnnnnnnnnnnnnnnnnnnnnnnnnnnnnnnnnnnnnnnnnnnnnnnnnnnnnnnnnnnnnnnnnnnnnnnnnnnnnnnnnnnnnnnnnnnnnnnnnnnnnnnnnnnnnnnnnnnnnnnnnnnnnnnnnnnnnnnnnnnnnnnnnnnnnnnnnnnnnnnnnnnnnnnnnnnnnnnnnnnnnnnnnnnnnnnnnnnnnnnnnnnnnnnnnnnnnnnnnnnnnnnnnnnnnnnnnnnnnnnnnnnnnnnnnnnnnnnnnnnnnnnnnnnnnnnnnnnnnnnnnnnnnnnnnnnnnnnnnnnnnnnnnnnnnnnnnnnnnnnnnnnnnnnnnnnnnnnnnnnnnnnnnnnnnnnnnnnnnnnnntgtgtgtggtgccagtgtgtgtgtgtgtgtgtggtgccctgtgtgtgtgtgtgtgtggtgcctgtgtgtgtgtgtgtgtgtgtgtgtgtgtgtggtggggtgtgccagtaaaaaagggtattgttacttttccctgagcttctgttaagccctctgtggatgctcccttgctcatccctgtgaggaactggggcccttacctaagtgcttgtgaccctttatgtggcaatgtttgttattctggctcatcccttcatgtctgcatttcctggtctcctatggactaagagattttgtgtggcaagcactatgtcttcatgagcatcttctcagagcccagagcatgtgtcatgtggatgtgaccacacagctatgatagctatggtaatatcactaaccaagggccttccattgtcctgaaaagtggcttcctgtcctgccacatcacagactttgataatctctactgtgagcacaggacattccctccactgctgtgatgtctagttgatccaagaaaaggtgattaaaattcagagatgagagagacagtggacccacccacagtttgcagtaaggttcactttaagatgggcctgtttctggtcctttaaaatctttagagggactgactgactactagggttgatgctgcttaacgacagaagcttaataagaaattcactttttgccttggtggcagttggcaaatctctaatgatatagtgccaaattgtctgctgctgtccctcgaagctctgaacagcacatctaggttataagaggcttttgaattctgtgcttgggcatgtgtgttttagctatctgctgccgtgcagattattctgaacaatgccgttaagacaggcttctaaaagtgtatcccacatagaagcttaacacagaaacattagttttcagccccaaatcatcttgaaaaatgcttggaggannnnnnnnnnnnnnnnnnnntaggcagctgctcttgtggtacctttggtgactttggaatgtataccagcacaccctcagccaagggatcatcctggctcagcccttcttttcctgaagccggtgttaaactctcatttctggtgtgtgcttatcaagtgtggggacctggttgttgctgagtggtagcaggtgtgtgggtcctggccacttaagattgtgtggatagaaccttggaaatgtatttccattgtgaacagagtcatgtgtctgctggcaaagtgcacattgtcttagagctgtgccaattctgtgcttggtaatgacctcagctgaaactgccctagtttatgctttggtcagtcactcacagtttcaagtagctgctttgcatggagtgttgggcacacagacctgggagattataacttgtgccatgagggggttaactccagaatgtatattgtttggtgtgcacctctctgctttaactgtgctgttgtttggcatggacaccaaaatgattttatcacccagagcttgaatggaacactctcagatactaaagaataaaatatgccagccaagcactggagagctatcttcttactcaggatttttgacaaacttagaaagatcccagcttgccttatttttattcttttttttccccctgattaagtggcattctttatttctactgttgaggaatatcactgttgttgccagtatgaataggatgcccaagtacaagttgccacacccatcctgtaagagccaagtttgcagccagtgcttgctgcccatgccctcaagggtgcaggtattttcttattgaggtatgtgcgtgcctgtgtgtgtgtgtgtgtgtgtgtgtgtgtgtgtgtgtgcctgtgcatgtgcatgtgtgtgagtgcacacacacgcatgagtttgtgagacaggattgaaccaagagcagtggaagggaagcgttctcactgctgtatttgcagctctctgtttacttttcatcctgagacagacagggtctcacaatgttgcttagcttgtcttgagcttgctttgtagttcaggctagctttgaacttgtgatcaccatgtcttaacctaagtaactggagttagaggtttgctcagaaagcctgggttaattgcccactttttttagcttaagagtttattaaaaatttattaagtatttatgaatacttaaagatggaaaattatagtcacaaagagtgtgatcatggtacttatactccataatgttttcctggagacttgattaattttgaaatgtgaaaaaaatatttggagttgtgatgcatcatgtacatttttgtacagaaagtaactgtgggaagccgtatattaggtttgttcaaaattgagctggtcgctgccaaggcaggatcatctggctctcgctcggcacgcttgcgtggctggctctctctcagcacgcttgcgtggcttcaccacctgctcttgctgttcccatttgcaaagctttcttttccaacccttgtgtcttttaaaacactttcaaacttttccaaatagcacaatataaaaaagcatattctgaaagagtttcaataattcagggggcagaacataggttcctcttttccagtgaccttgctgtggaaacttcagtacacatccttctggatgtctttcatgcatacacaatgcatagatgtaaatgtatatgcatataagatacacttgcctattttaacatctgtgggagaactatactgttaggttgctctgagactttcctttctccgttcattaatatgtgctgacggcttcagctctgtgcttcctgaacattctggaaggtctaagcccaccctcggagaatgacctcagtggctagagctgccttggccagctttgttccaacatggcttcttacactcactagtcttatcattaaatctgttggcttccctgggagataaagaaacccataaaagcgggatgatgcctacaataaaggacactgtctactaagcatgtttgtgctccatgccacattccaagtgctgtaacatattagcaatcctatgagacagacaggaaggcccaggtgagttaggtgcccatgaccaagtcagggaaccaacaggtctcttggttttccagcgctgtcctcatctttagataagactagtatcacccaccagggagagtgatgtgagatttaagtttacagatcgtgccttcagatcagccatgtgggaggtcacagccctgcatgcaggcctgcgctctcacggtgcactctcctcatgacacttatcgtcactcagcacagaattggttgtctcttctccatttgtttcttttctacttggcctgagctcctgacacctactgtgggctattaaatatttattgaacaagtgactattagttcctgcttcttaccaagcacccttactctggatgcccagaacacgctcactgaacttgacctggtattccagcccagctcagtgtggcagtctctagctgaccatgctgctcttgtcttttttctaccttgccatcaagtgtaaggaactattgcagcatgtatcgcacacccctgatttctttgataactaaatcgaaaccatttctaatttgggtaagaagttatctgtcagtcacggaaaaacttgaacattttgtagtggctttcagaaagcccagagctcagtaaaggagcctatggtggagaaaggcatggaaaatggaaactgctctgcctctgatcttgatatcaagagcacatcccaaggctgccctgaaagctacaggttagatagcatgatgaaggattctgggccctcagacgtcaagattttctctcttctctcctgggtcgcatggctgcatacaggatccgtgatttactttcctcggactcagttttcacatctgtaaatggggtaaactgtcagggaaggctgtgttgtgctatagtaacatagtcccaatatgtcacaatgggaaactgctgtttctgtctccatcatgtcccttgtccctcatgggtagcagggactatgctccatggtttccattctccttgacccagacctagactaactcgagaaacaagagataccgtctctcaaaaattccacccagaaatggaatgtatcattaataaagcaagcccctgaagtccgaaaagagaagacagacttactaaggagtatctcaagggctccacaggtagtgtgtgcctcccgagggtgtggctggagaatcctgtgagatagcacgctaagtgcttggttcctgggcactgggccatggtgctggtgtccgtggcattgtagggaattaaggcttgttttgttttgttgatctgtttgtgctgtgcacaagcgagtggagtctttcagttacctgcgtagtaggtcctgggctggaagagtcaaggccgatgtgtttgtgtcttgaaagagtgctcccctttgaaggagggttgagttgtttcatttgggttttcgttttcaagaccttagccttgctgtgaaaacttacagactgacatataatagaatgtaagctggagggatccctggattcgtggtgcctgtatcattcagaatgtctccagtgcaagaccaagagaaagcagcccagacaggcctcagcaaagacagccaccatgctttagataagtacaaactgtggagtccatgtcatgagatagcccatcattctgtcctcactgtcccctgccacaaccatcttatccttctgcggatggtagcaactccagtgtatcattgagagaaagagtgaccccagcatcatgaacagccctgggactactacggcagagttggcttagctcactgcaccacctagaactaatctgtacggccagagcaggtcgcactggttagcttgagttatttgctgtccacccatgggttaaatcagccgtgggatgatttcccaggaagcaaatggatgctaagcagcaggcagccatagtctgcccccttttcctgcatctccctttcttcaggaaatatgggaactctgaatagcaaaatgactgtgcctgctggtgctcagcctgctagacgagagtggaggcaggtctagcagagctcctttttgctgctttgacttgtctcaaaaaaacaccttgtataacaaccaccaagttcaaaagaggggtgtgtcacacctggagagctgtaattatcaaggggctgttaaacatcacccatgcagccatctttagcagacctcacttgctatttgttgacaaaagagattaaaaaaataggtcagtttcttcctggaagggacattatttgttgcatctgcaaaaattgtttttgcacataagatcacactgataaattttgagttttctgatgtagatgtattcttttagtggcaatattcaaccctctgtagctactattccaggaaaaaaaaaagaaccattgaatatatatatatattttttttttctcaaaacaaaccaccagacttaaattcgatatcttcttggcccccactcttgtctccatgtaggatatctgcacatctgttgcagtgagctttgtgcttcttccactaaggatagaaagagacttgtgattgtgggacatcattctgacgacagatgccactgtgtgtcttggtgtcttggtatgagcatcaggtgtgtggttccatggtctgcttcttctcttgggatgttcaggcactgctgtacaccagggatagagcagagcagagccaagttcaggcattgatatgcactgggtggggaaggatgaagcaaaatccagagtaggcaagtcagcaggatggtccagcagtgaatgccagacgagggagggtcttctctgaagatttcagtgttacagctctcttggtcgatattcattgaaacaacttgtgcacatacactctcttctgagcgaatcaagggctatatatgttgtgggaaatactaaaaatgaacccgccaactctctgcactcctgcttctctcaacccaccaactccctggaggggccagacctggctgtgctcctgacgcatagcaaagctccccacccccacccctgtctggcttgcttgtccctggagccgctagtttcctctctgccatctgcagtcccacattccagtaaccacataaagcaaaactcttgaaccttataattaaccagtcggatttatgtgtcaaaaaaaatcacaatttaaaagatgctaatacaataatttcagaactaattgataatgataaaagctttatcccaattattctaaccttatgatatcataactacccatggctggttaaatctacgctggttcatgtctgactccattttgcctccttaggtctgcctcccttatccctgtccaatcacaggcctcctgctgtcctaatgtaattggacatggaaaattcatatatatatatatatacacatacatacatatatacatacatatatatatatatatatatatatatatatatatatactatatatatatgaatgaatgaaccttggagagtgggacgggattgttagggtgaagtttcattggttgaggtacctcatttgcatggagagctatttgaagaaattgaatctggcttgtgtgaggctctcctttctgatagagaggacctgattccagcttggaacttgatataaatttttgataagtgccaatagtcggggagtgtgtgggtttgtaatattatggctgactctcaaaacaggtgactgatcccaaggccagacctctgggtgtccaaactccttgatgctgcaggtgactatccacccccgagtggtggtaactggaaagaaaagtgcctgctgcttgctgaaaccagctctgccctgctctcagtaggcagttctcatacccacaccagctctgcctggctctgggtaggcagttctcctaatgccccatgccagctccaaggcaacttttgttcctcttcttcccaggaggaaaggttgtaacttgtgtgaagctgcaagctgagtcttaactggtcttcataaaaccaaaacaaaagccaaacttatttagctgaggaaagaaatccaaacagattattccagagagctaatacatatgacaaatactgcagaatttagaaaaaaataaacaacaacaacaacaacaacaaaaaccacaagagctttattgattaaccacctcaaaaatactttttcttttcctttttatcaggcttattctgtgttagtagtaacacagttcagctattcctctagtccaactgaataaagcttttcaaatattttgtttgaaaaacattgttatataaaagatttttttttcccattgaatactggtgtattctccactaaagctgtgtctctaacatcgtcctgtacctgcttgtcacttgtctctccatcatccatcaattaaccgttcatcatccattatccaattaacccccccatctacctgtctctgttgtccatctactaccacccactgtttgtccatctgtcatctattactcatccatcgaccatccatcacttatgcatctgcttcccattaactgtccatccaccttcatttgtgctttgttattagtttttaaaagttgcagacatcaccacacatttctttgtaaggttcatgctgaactcaagctcataccagaatgcctttccctgctccttccttgtttctccatgctccccacccagaggcatatagcttgtatttgatctttttcttctattcttatgcatataaaattgcatgattactaaacttacattgagaacgttaacaactcgaattacacttagcaaaaatgtgaaggttccaagttttacagaatggaaagctttttccttctgatctttgtttccagtgagtgcccttgcttccaaaatgctcagtccaagtacagaaagctcaccccttcttcataaagacaatggcttccctgcaacctgctgtgtgtcaggcttttgctttgacgttctgtttctggccattgctcgtttagtagaggaggaaggttgcagttttcttgggagctgtgtggtcttatccagactgtgtttatataactattcatgacttcctcccaggcccgtgctactgtgagtggtgctgtagtatgtccttgtatagtttggctccatgcaaatgttgtctgagcacaggaagaagctggtgcccactctaagtaaactggatagtttacatatgctccttccttccttccttcccctcctccagccagccactcctccgtctctccacttttgcatgtctactccttgtcatgcagtacaaacattcaatgagcaatctcatccatgcctgatgccattttgggggtctgaggatgttgctcctgaaaccctcatgatctgatgaggaaagtgacccaacaaaaagaagtccactgacgctttttgggctgcacagaggataagataaaaaggctcttaggtgctacctcttgaatctttggccttgattatttttttaaaatcacaagcatctgatgcctgtgattgtatttttgaaaaccaggtaaatgaacaaacaagtaagagcagaaccttgcatgtggtccagcctctctgagtcctcctcgtggtggtaagagtgcaggtcaacatcatggttccttctgcagccacgtctgcctggctggctggcccagccagaagataatagctgtgcccctcacatttggttccttagtctaaaatgaagtaagaaagcagagtgccagtgtgttgaaaaatggttctcatttttggctggaaaaaaaaaacccaagagagctaattgcttctgagagattatttgaaaactgatgtgtgaaagagtgactgcacagagagcgctgtgccagctcatggtcgggacaaatattcattgtggctgccacattttcttcttgccttttcttttgagcagtgaacctgagagctttgaaattgaaagacaaaactagttttctttggttcttttttatccccaagccaacttattctaaccacatatgaggatttttgaattgctgcacagcagcttaaaaattgattgacatttcagagcggaaatatagtttatattataattcattcatttaatcagtacctgtggtgtgccaggtgctagaccaggctggtgggtgtcatgtgaactggttgatgtggtgaacagggaaatgcagactgctctctgagctcaccggggtgagtggcagtcatagaaagcctgtgtggagtgatggcactctgggacaggtggataatagaaggtgttggagctccacagccaaagctctgagtataaactatgtcaccctctaggctcctgtgaggcagagtgtgagcagtgaggcctctgtcgtggaggtagcaaacccttgtggtgctctttgttctccggtgcctgagctgagatcctgctgccagcacttagtgccttgttacatttccttggacagtttttatgggcttctgttaccatatgtagaaggtaatggcttaaaaaaaagcatgccagggctggagagatggctcagggattaagggcactgactgctattccagaggtctaggattcaaatcctagtacctacaggacagctcatacctgtctgtaactccaagatctggcactctcacttacacatacatgcaggcaaaacactaaaacaccaaatgcacataaaataaaggttagaataaaaaaagcatcaccaagctgggtgtgatgcaaatgcctgtcatcctagcactgaggagtcttagacaggaggattctgtgttgaaggactcattttctctgattaaagaattaaaaacaggcaaaatttaaattttattagaaatcttggggagtcctaccacatgatactggggaaattgggattctttcttggagttcttagtctcataaatggatttaagagtgcagtcaaaaggaagctcaaggacagtttatcgagtttaaaagaaaacaacaacaatagcaaaaccaaagccctaaggcaggccagctgtgtgtctcgaagccgcccataatgtgagggtccctgcaagccccagtgactgcagtggggagccaagaaggaaacccacagggttcagggtgacttactcactcatccaggctggtccacacttctggagtctgaccctgggcagctttttgtttttttttttatttaaacacagtacaaaaaaggtttcctcatcatacttatcacaataaggcttagggcatgtctacatggaaattccttggctaaaagcatgtcttttgcaaggtacctgtgacctcttccacaagaatgggttctgttgactgagaaacagtgctcaggagtctgggattccagtgaaccctggctccacagatagcaaaggttattaacatatccattcccagtcctctggatggaaacaggcatggacatttcttcccttaaagagaaaaacctacacatttaacattgtgttttctatattgctatctatgagcatatggaccccataggaggagaatggaggagagaaagggaaaaaagctggcaatgaactcagtcatgtggcagcaggcatggaggtcaggcatggaggtcaggcctgtggcagctggcagccacatggagggagcttttgagaatgagtaaggaaggccaaagtacaggggattggacttaggctctgacagcctcagaaggagacagaccctaaagaggaacagagagagaggcctttcctttcagtgggcaaaccctactgaaccccatggcagcttctagggactgcatcagggacagaagtgatctcacagtgaaccaggctcttgacctgctcaactggattaactttgaaggaaggagacaagggcatgtcttccccgagaggagcagtgtgtctggtgctctctgcatggcatcactggggctcctgagcaggggagcctgggctgtgctcacgatacctgtgcttctgctgtgtgttcgtgtgaggccttacgacatgtctgtggatagagatgacaccatggcccacagctactggctggaggggcctggggtgggctgtgtgtgagcatgctttgtagtgcagggagcctttggtgatgtgtggtgatttcttgttggttgccccttatgactgtgggtatggttttgctttttttattttgaggcggatctgtctcacaaagttgcctgggctggccttgaactgtatagcagtactcagttgagcactcagattgatcctggtggcagtcagggagcagtggcacgttcctcgctacctgctccaatgttctgggtccccaatgaactgaatgaaatacacacacacacacacacacacacacacacacacacacacacacacacacacacagcctttatattttgatatgcctaaaacagctcaatgactgggccacttactaacctccacatggctaatccacctccctctgatattcccgagtcatcgcttactaaaatctatattccatctttgctgccctggacccagttgggcaactttcatggggctactctgactccaacatgggggctatgctctctgaccctcaccttctcaggtgcaaatctcctttgtctttcctcagtgcttgcctgggaattctaaaagttctacttctgtctgccctgtccagccattggctgctggcaattttatttagtaatcaaaaccaactgggtgcaggatccctcagtgtcttgtgttcagacatgcagattctcatgcaattttgggaacccaaattaccacagtagaagcagcattagaccaaacccactgcattgaactaatgatcctctttcatcccctgtacaccctctggcatagctccaccatcaggcatgtttcctgtctaccctccctatctgtacctatgtcctgattcttcccaggggagatactaaagatgccgaggaagctgctaatggtttcctttctccttcccctttcccccttcctccccttgtttcagaagcatatgggggccacatagtgggcatttgaggcagactctctggtgtcttcttaagtttgggaactgacatgtcagggtgacaggactctggctagagttccatagtgacagtgatggtagagtgtggtgcccactgagagctattggctttgtcctggctctgcttccagcccccaggaagccatgagccaggaaaccttgctggtgttgcttgggagtgggttctcccgtctcatctctcactctgcccttctgtggatagcactgggggtttttgttccaagaagacccaagaatccatctggcctgtttctccaatgataggttttgcctattcatgtaccaccattcagccacctcagcactgcctacatcattctgggcctcgtgagaagcagatgggtagactgtgttggtcacttaattatgcctgcatggagggcaagccaaagaggaggccacagtccagagctgggtctccttgggttcctcaggtttcaggaggtctaagataatgcttgtggttagtatcagaaggaagttggtttttattataaaatagctctgttccatcctaattaatgcctgaatgtgctgtggaattagcattctggccaagcctggtagtacagacctacagtccaaactatttggtggttaaggcaggaagattccaagttcaaagcctgcctgagctccaggtacgttcaaggctatctctggtaatttagtaagacctgtctaaaagtacaaaataaagaaactgggatataacttagtaggggagtgtgtgtggtgtctaaatggtatcttcagcactaagaaagaaagagtagcttatgggcattggtgtgagccccagtggagatctggcatcactttggacagatagagatagcagaacagataaactttacatagaccttgaccttgactctccaccacctctatagttggtgcagagcctggcctggttgccagcctggctcccctaaaggttcccaaggacacacacaggcttttcttccaagtagcctctccagtattcaggaagacacataaatatctcctggcttcctgatcctgataatgccacagaattagaagaaaagcctctaagctggcaggacttacatgcctctgagcacttatattcactgtctggaaggttcccagaaaactatcgtccccgagggacacttactgtcaggaaaacacctggtgccacttcctccttgaggaagtgctctgctctgtaatggcagcttaatgcctgcccctgtcttctcctttcctcccctctggtttgcccttggtgtctgctttgtggaacgagcacactgagaggctcttctgaggtacactttctggggatgctgtctttaagatggtagctctaatgcactgctgcctggtatccttacagccaataagcccttcctcaggcctgaacagctgtccctagcctcaggccctgggagaagattcaaggaggagcagtggctgagagctgctcctccatcactcagtgctggttgtgtctgtctgtactgcacttctgtgccactggggtgaggagcagggcgcatggcttcatagtcctggctctgtcttggcccatcccacatgttccagtgactctgaaggcaaaatctctcccatccgactctctgtaacttagtaagctgcaagagggccagaagaagctggagaaagaatatttaccttaataatatgatagatacacagattatcctacaatgtgtatcaatggaaataccatcattacagaatactgcagaagtgcttaaaataggtagttcagcctcatctgaatttgctgtcatcttctagttgtattttgttctaacagtattgacacacacacattcttacacttagagaccatactggccacgtgtattccctcattgcttttgaaaaagaccaagcttttatgtatgctattaaacttttatcaaagtacactttgagtagctatcacacttttatttaaggtttttaactggtagtactgtgtttcaaaatgcattctaagaggctggaaatgtagctcacttgacagagtgcttgctgaacatgcataaaggcctagcttccattgccagtactgcataaatcagccctggaaaggcagagtcaggaggatcaaaagttcaaggtcatcctcgtctatatggagaactcaaggccagcctgggctacatgagaacctatctcaaaacaacaccaccacaaaatggctgtagtgatgaatggtggcccagttctaccccaggtccacggggcacgtttgccatcaataccttgagtttcacatctgcaggttttggatgcaaaagcaggcacaggtactaggtaggtctcacctctccatgttggtgccctagttgagttaggcttgcatctgaaccagatctgtctcatagatctttgcataatgtagagaaagtcaactcattctcgagaagcatctcagaagatggctcattccatcttacggaagctgaggctctcaagctcactctccacctgttggcagtgacagctcctgtcaactgcttgttgtatattatctaggatagtgcatgctctctcactctcttgctctctttaaaaattgttttaagatgcctccttacatggcctttttctgtagctaacattgttaaaatagttgaatagtttatatattttaacttctataatcaaggacacttgagatttggttttggtttatactggggatggaatacagggccttctccatgctggcaaatgctctaccactgagctaccacctgctgcctgagggatgatctctggcaaacattttagatggtgtgggcttgttgcttctaggtaaattttggcaaaaggttccttcttaaaggatggcttttttttttttgttttgttttttaagtgatctcggtacttgcagcctcctgccttctgaatatgttatatcagctctttccagctacctacagaaagtgatagtcacaaaaacagcaatgtgacacaagagcccagtccagtaagaccttggacaagtgaggaacttggtgctgccttgtgagagtggagtctgcccagtgacaaggcagaagtctgtctgcttcctgaatcttctgtacacagagctctcagctaactgcttctagaaaatccctcacaagcacacccaaaggtgtgcctcaccaatctagatgattctgaatctgtccatcacagtgtatctcagaactgatttgctcaggaccttgggactaggaagaaggcaggctaacatttggtgtgaagccacttaggtcaagactcaggctcccactcactcctgctcctgtctccacagctgggctgctctctctcttcaaggcacaccttctagtctcttccagccttccttacacgaaagcctcaggactccacctttagctggtttcattttcattttcattagagaactgaacagacctggcttgtatctgcttcctagatggaagctccaattcttcttttcttttcttttctttttttttttgaaggtgaacatagttttatttcatattaacttacagtgttctccacctcacagaatagagcctatcccactatgtcctcaagctagagactcagggaatcattcctttgcatctatctagttgatccccatggccccagatttgtaacttccaatattctgagacaatcccttccttcctctctattcctttcatggcctcggccgtgaccatacttttgcctgaaggctatcgcagcctcctaccttagttctgcttcctatgttctgtatcctttataagaccaaccaagaaatctcataagtttgcactcaggcataaaactccaatggtttcaaatggctgaaaagtatatggtagcctctctgaacctgcactgtaagcccatttccaagcctcagtttttgccactagctctcccaaaatgttcttctcattgttcctgacattcaagcagcttgtgactatgttttatatttatattgcttactctatatattttttaagcactctgggattgaactcagatcttatacaggctaggcaagcaccctgtcactgagatacacctcaacccttttattcattcatttatttatttatttatttatttttatttttatttttcccacatttttattacatattttcttcatttacatttcaaatgctatcctaaaagtcccctatatctacccccacccccaccctgctcccctacccacccacactccctctttttggccctggagttcccttgtactagggcatacaaagtttgctataccaaggggcctatcttccaaatgatggcggactaggccatcttctgctacatatgcagctagagacacgagctttgggggtattggttagttcatattgttgttcctcctatagggttgcagacccctgcagctaattgggtaatttctctagctccatgttgggggccccgtgttccatgctatagatgactgtgagcatccacttttgtatttgccaggcactggcaaagccttacaggagacagctatattagggtcccttcagcaaaatcttgctggcgtatgcaatagtgtttgcgtttggtggctgattatgggatggaccctcgggtggggcagtctctggatggtccatccttttgtcttagcaccaaactttgtctctgcaactccttccatggatattttattccctagtctagggaggaatgaagtattcacgcgttggtattccttcttgattttcttgtgttttggaagttgtatcttgggtattctaggtttctgggctaatatccacttatcagtgagtgcatatcaagtgatttcttttgtgattgggttacttcactcaggatgatatcttccagatacatccatttgtccaagaatttcataaattcattgtttttaatagctgagtagtacttcattgtgtagctgtaccacattttctgtatccattcctctgttgagggacatctgggttctttccagcttctagctattataaatagggctgctataaacatagtggaacatgtgtccttattaccagttggaacatcttctgggtatatgcccaggagaggtattgctggatttagtggtagtattatgtccagttttctgaagaaccaacagactgatttccagagtggttgtacaagcttttaatcccaccagcaatggaggagtgttcctctttctccacatcctctccagcatctgcagtcacctgaatttttgatcttagtcattctgactggtgagaggtggaatctcagggttgttttgatttgaatttccccgatgataaggatgttgaacattttttcaagtgggaagctccaattcttgatttcacttgttagtcgagggaaacagcactcaacttgcctcaagttgtggaaattgatggacattgtcaataaattcccctcacttccccatgctggtctctggtttaggtgcttcccttttctttgtctagattcttaagatcctagtcaggttcaggcataaggtgagaagccccaccttgggaggtggaaaacatcatcatcattttaacagctaccagcacgggtgtcaggtagccagggcagagctgttctaagcccttgtgccagccctgatgactgagtccccatctcagtccagtgttgggggttgggagatcactggagttcacgtgctgtcaatatctcctggtcttcacacttgcctcatggtgtatggctgggacccgagcagtgttggtaagggccatcatgacactgtctgatttctgttaccaatcatgttttaacataggtcttgtcagtcagaagactccatgttctttcctcctgtagttgcacatacattatagggcaaaaagacagccattttgagagggcagtggccttttttgctcacatactgggtgtgacattagtgatactcttcacgatgacaatagatattttttttcattgtacagatgatatcttatgtcaccagtcctaattagtcctttatagctccaaaattacatacttttatatgcctgtgattatctcaataggattaacagtgatttttctgtaaagataattgagatcgtgtgtgacagcgtgttttaatgactgcagtatcatccccagccagcccttcatgaaatcttattgttttttagtagttgctttccccctcactctgagaggaagtgttgaggacaggagagacagaagtttttggtgaatatgcaaactgataacccatgcatttccccctgccttcctttttctaactgcaggtgcctggagatttgagccaaacatctgaagatcagagtttgtcggattttgaaatgtaagtccatgcatatactcttgaggggcctctagagagtgaaccctgttgctggcccacatcctgaaggcagaaatgcctatgaggtccacacagggtccatttggttatagagctgggaaagttttctgaggtcccggctgtctaatgtgctttattttctcttgggccttacaatcattttagttttgacctaaatttcccaatttaaaattgggaaagtgttacatagagttttcactttttactcccacatggccacagtcagctgagcaggccagagggtcttttgcacagggtgcacactccactcttcaccttggtacagcctcatgttccctgctgctgtccagcccatccacgtctgtgtctgcgtctgcgtctgcgtctgtgtctgtgtctgtctgtgtctgtgtgtcggtgtctgtgtctgtgtgtctgtgtctgtgtctgtctgtgtctgtgtgtctgtgtctgtgtctgtgtgtgtgtctgtgtctgtgtgtgtgtatgtgtctgtgtctgtgtctgtgtgtctgtgtctgtgtgtctgtgtctgtgtctgtgtctgtgtctgtctgtgtctgtgtgtctgtgtctgtgtgtgtgtctgtgtctgtgtctgtgtctgtgtgtctgtgtctgtgtctgtgtctgtgtctgtgtctgtgtctctgtgtctgtgtctgtgtctgtgtctgtgtctgtgtctgtgtctgtgtctgtgtctgtgtctgtgtgtctgtgtctgtgtctgtgtctgtgtctgtgtctgtgtctgtgtctgtgtctgtgtctgtgtctgtgtctgtgtctgtgtctgtgtctgtgtctgcactgctctggttttgtctggccccgattctgtgtgaatgctctactggggagcaattatagtcagtcttcagacactttctgtttggtgatccataggctcctcaggcccctcaggaacatgggcccagaaccaggaaggtcctcctccttctcttcacctagttgtagtcagtggatgcatgtccaacctctctagtttcagacccaggaattcaagacccactagacacagtgagtctttgtctcaacaacagaagtcctgcctccctaggcgaagggtcatttagaaaagctatttttagagcatgggggaggcagaatgttagaaagaaccttttgtttacagccaggagatctgtgttgaaatctttgtcactggacttacaacattgtgatctcagataagcccctctctctgagtcttagtgacccctttcatagggtgaaagtcctggaagcaactttgtggaatatgttagcaactggaatgagactgtggtcagcacagaacattaggagccccatttgaggctgccatagaggtggatgtggtagaggagaaaatgggtggtggtggggagggtgggaagaatgatcaaagtcaaaactgagcttgaccctccagtataaatgcccaaccacagttgaaaacaaagccagttctatgacagtcagggttgcatataccatttccagtaatagagcagctagaaagactagtaaggtaactgaacctgagcaatattataacacagttaagcatagcataaatagatatagagatagaaagttatatagatagatatagataagtgtatagatgctatagatatagctacatatcagatggagcactccaccaaatagaatacacacttgtgttagtctgcgctttgttactgtaacagtatttaaggcaattggcttatagagtagagagacttgtttgttttgtaggtttcaaccaatagtaaggtagacctatggctcttgggcctgtgcagagacaggatgcaatggttctagcaagctgcctgcctcatggtgctgggaagcaaagagaattagggaaacactgtgaccccataattctcttccattctgccttacttgctaaaggtcctgtgacctttcctattagggccaagcctttaacacatgagcctttgtggatcctatagatatatatatattctagcttgattccaagctagaaaaaatgtcttcccaaattcacatgagacaatctccaggttagaccatgtctcaataaaattttaaaactcaaatcatactatttcctttgtccatgtagaataatttgtataatttgcagctttcatggtgaacaagatactccatgaaggagagagctatgtctgttttttcagctcctctgtctcttatgctttgcattgtatgtgccttgtagaaggtcctagctggacacttgttctatgaacagatgagtgatagatagggggaggactagaggaccagcagagatgatatgcaggagagtcacatagatagtcatttccaacagtgcagtaaatggtctgtaattagaacatgtgacccagtatagagacacctgctttggccctgcaggatcactggccttagcactgtggggaacagagcagaaccagggtgttgctactctgtactcctgtctgggtttgggaccttttcctgtggagtaccacgggatacacaggccaatttgatggctcagaattgttgattgtgttttcaatcctgaatacatcactcaggttgcttgtcccctggaaggagatcaccaccttggccgagtgtacaagtgccagggctgcttacctgagggttagtgtgtgtgtgtgtgtgtgtgtgtgtgtgtgtgtgtgtgtgtgtgtgtgtgtgtgtgtgcatgaagatagaatgcttttcactctggaggctgtgagaacatgaaggttgtagagtttttcaaaaaccactggcctatgctacaagctcaggaagctgacaagctctgagcaggggtgctcagggaaggctcctctccctggagagccatagtccctactttcaggttaatggagctgtggcaggttaggcactgtgtaccctaagtcgtaccataaggcagagctgccatatagccaaaatgccctcaaatgcatcttaagtagttttcatgggcattgagtgagtcagtgtacatgaacatggagctgtgcagttaatgtcctcaggaaatgaatttgcatttgaggtttcctattctgatggtgctgcagatggagcccaggcactggcttatgctaggcaagtgctctgccactgacccatgcctccatgtagtgcagcttacatcttgcttgtcttagactgcttgtcctagtgaccatctctgttgccatgataaataccatgaccaaaagcaacctggggagaaaaggcttattgacttatgtgttactgcccatcatccgggaactcaggcagcagcttgaagcagaaaccacagaggagcaatgcttgctagcttgcttcctctcattctctacctccctgttacaacccagacccatctacccgggaatgacgtctgtcgcagactggtcctcttgcttcagttagcaattaagaacgtgcctcatagacatgctcacaggccagaccaatggaaacagttcctcagttgtgtcaagttgaacactgaattaaagcacaaatgcattatatgcagtattttggagacatctaaagagggtatctgtacctggcatctgagtttttctaatttattattttatattgtctctccctcaatcccaagtcactttcaaaaccacaggtattgcttctgtgagctattgtgtagaaatggagatcaaggtcagaaatcaggcagtgtagaggaggtggtaccatagggtggcctcccgtggctccctgctactgctcctttatcagatgtggctgagtttcagctgcatcctaggtcaaggccacttagctggtaagaactgaagatcaaacattttattcttgagaatacactacatatgtaagtttaaataaatacatatacatatacatatatgtgtgtgtgccttatatatatattctcatattcatatatgtatatatatatatcatatgaatatgagatatatatatatatatataaaggcataaaaaacacatatatatatatgtgtgtgtgtatgtgtgtgtgtgtatatatatatatatatgtatatatatatatatctcctttctggtatatatttcttctggtatattttaccttcttttgatcattcttttctatatgtttctttagaaattatcttgaatcttggataatacatgtttgttgtataagtgtcttatttgaaatgccttttattggagaaaatagtcccttagcctgcttttgtttttttgtttttgtttgtattttgttttttggtttcttttgcaaataaaaatggcccctctcatctctttattctggtcagatcaaatcgggcactgatcaatgtctggatcccgtctgtgtttctccgaggcaaagcagccaatgcgttccatgtgtatcaggtaagtgcctgggctttgtgtagacatcatggttgtggagccatggtgctttgcatgttggcaccatttcctgcctagtgctagtgttgctgttgatttctgtctgtggcttgatggctgtttcccagcagcaccgtatactcagccttctgcatggcttcagccaaggcctggaccatatcatagtccttcttggatctctggtctatggctgaatcttggggttaggtgatggattttgattttcatagctggcccaatctggctccctgtacccactgctggtacctgggttggcactgatctcactcaaccacatgtctgagagtgggcagatgggacatgatgcccgaaatgaaacaagactatgcttttgttgttgttttaaggatgttggtatatagcctaggctggccttgaatttgcaagtgtgtggagtacaggcatgtgctaccatgcccagttaagttacccattgcaaaagaaaagagccctagatgcttgataagcaaagagtgcagatgtctccactcagtgcctcagtgtctaagctctgttcacatgactgctttagggtttagctctgcaggcctggtacaatttggatctggtctgcagtcagacttggggggatttttatgtttgtgtttttagttctgtatataacatgggtatttgcctttgtcttacagtgcttctagttgatgttcacaaacattttagaaagctttgtgtagtgttttccatggcactgataatggatagaagtacttaaataacggtaccactgggcattgcttacaagattttttaaaatgcatattatttagattcaagataacttctagagaaaaatatagaaaagaatgatttaaaaaaaaagagagaaatataccagggtagaataaaatgtaaactcaaaggttttaaaagaaaaaaaaaaagcagaaactgtatttattctgacgtccaacaaggtcttcccagttatttgagcttcccatgggctggcagccatcgtgaaatggaaatgcaattggctattttgagtaataaattccattgctaacaacaagaaaagatgctaattccttaccggaagctaaaaaagaaacctccatgtgtggcttcaccagtgaggaaggctggaacagtccatcttccactacatcctgtggcagttgtcaagggacatctttttcaggcagctgagggcataactacacacatggccccatgcctgtgaggagccctgtgcagcttctgtccccccaccacagccactaggtacacacagctgtttatattgaagttatttaaagccaaatagattgaacacatctgctccttggtcacactagtcgtgtggtgcttactagctgtgcctgtggtggccatgttgttgcagaagcttcgatggggccatgcaggttgagaactgtgtctcccagggagggggtagcagggtctcatgtgcactggaagtttaggagagagcacctggaattcggatggcagagcgttggggagagcatctcccaaatagtgcttctgcaagacccctgggctgagaaccactgttgtactgcttccaggatgggtgccaaactctctgacgttacagggcaatattgttatctacaacatgttgagcgaccgtcatcactattttggaacacatgtggcttgtgagctgcaggttagagatgcctgtctagtctctggaggacagctttgtaccttcctgtctccaaattacataacacagtcatccgacaacaggtgtcatccttttcactgtgtttatttttacatttgcctctcagttatgacacagttctattttcccatgttccacaatgaggtgcgatttccttaaaaataaagcttgagtaaataggaagcgagtcagcctaaagaataataaataataaataatgctaaattcacagtgtgaaagagcagcaagtcaagggtgatgcaggcaggctatgttagcaacaatagtcattaccgctgggcgtggtggcgcacgcctttaatcccaggactcgggaggcagaggcaggaggatttctgagttcgaggccagcctggtctacaaagtgagttccaggacagccagggctatacagagaaaccctgtctcgaaaaaccaaaaaaaaaaaaaaaaaagtcattaccagccacaggtcccctgtccccgcactgatttgcatgctgtgggaatatgggaacctagtgaggctagacactcttatccctatgtcacagcgagaggacagagacacggggaagcacctgctttagcaatgtggctttgtagctcaaactgccacccctgccagatttttagagatctggttttactaacttagctattttcctggtgctgtgatcattaccgttggaaaaaaagcagcttagggagaaaatatttgttttggtttacagctgcagaggcacatagtctaacaaggcagaggagatatggtggccatggcgcgaggtggctggtcatggtgtgcacgcaggttgcagaggagtgttgctgtgctttaaagcttcaaggtccatcctcagtgacccacttcctccacccagactctccctcctaaagattccacagccttccccaacaacaaacatcctggagcaagtgttctgtgtgagcctatagtttgcattcaaatcacaactccgactgtgggtagaatctagctttttggaaactcttagaaaaacagctgtgacagctgcccttattccaaagggaggggcccagcctgcctctggtttttctgtaaacacagtcacctgcatccctgaggtgatgggatgggtccagacatctggacctctgcagtgtgtactgcgcacacatgcatgcatacacactcatgtactctcttccagcctgctaggcacaaaagccagacagaagccattgtctcaggaagttgtgttggctgtctcccagtgaccactcctgtcatagcaggactttagacttgctccctcaggacattttgttggtgtaatgtcaggtgcctgaagcctgccttataggatggctcagagatggtattctccaatgccagagacttgaagacagtttatctacatcacacagatactcacctcagcccctgctctcatgctaatgccaaagagggttctagcaggaccggccagtcctgaggagtgtggagactcctgttcctctgcctacagggcactggaagtgagaagtggcattttggcaattttcagaatgggaatgacactggcttcaagtgtgttccaagtttaacactttttatcctgaggatttcttacactttggagcccactgatgtctggctgccaacaggctgtagccagaaacgaaatgctgacacagcgatgagtgggaacaaatccacaggaagccacctcagtgcacagtggtctcttgtcttccctccctctcatttttagtatggatgtgtttgtggtttgatttcatgtcactttcacatggtgtaattaagtttgctattgatcaataaacttctagcttatgcttctgcaaatgtttaatttgattctccagataacccaccttccaaacaagttgaagatcggtgccattggccaactgagaatgcttagagagtaatcttggcccttaaaacaacctaccatcccctcctcctttggcaaatgttacagctactccgttgatatgcaataccacaccatcagcacatatgttcctggccctcgagcccctccctttagaagtaccttttctctaagctcacctggcgtctgttgtgagattagtttcagcctttgaatctactcaccagaagcgtgacccaattaggttttctttgtacaatgtttcagtcaagcccttttcttctagaatagctgtctttcctagaggccacagggtgttgtcatggctgagaggaaaggtggtaccctagaaagactcacttagtatttgagctccccactactatcccagtcctgccaaagaaatatgcatagccagagtagttaaatgtttatccagctgagcatgtgtgtgtggaggatgctgggaaattttattttcccctataaataatagatcataggcactcagtaggctaaatggtttggaggggtgatgtttttatattccaggccttgggtctcttggctcctctttcatcttctttcctaaggtggtgtgctgtgtgcctcaagtctcttttatctcaggctccatctttgtgtggctctgcagagagagggcatctgctaagtaagaaagatagcagagctgcattcggaaatggggactgcagtgcagaagtgtaggctgcaaggacccgcagccttctcagccttagcacatgacatttcccatttggggaaaagcaccaatcagttccgaggctgaagctgcctcctcccactcgtacctgcttccacctgttgcatctactgtgagcgtgggttgcctcgagagcctagtgtggccttgctgtgtggtgactgtgatttctcgagctagtactggttaacttctcatggctacaggccatgagaaatcccagtgcggtttccttttctggaacattccctcccacagcactaagtgtctagggattgcggcccgtagccccaggtgctcttagagcactcaagcctcctgcggattctctcttggcttcaggtgtcactgtgattctatcctggtttttgtctttgcaaataggagggatttttatcctttctttgtataatttatttgtccctaagctagtgaccaaggacatgctatttgccatgcactgcttaacttgtgcaagagctgggagtgagccagactctcactgagctttctctcatgaccctatgtgtcagtgggggcagcaggtcggtggtagtgacaggacatggccacatgtgacagcatgtaaaggctgagcacatatgatctttgtggacatgactctttacagttcatgtgaccgcatgtctttgggcatgttctgacactgaaaaaccttgattggcatccaggctgtccttcccagaggactgcaaggaatgaggcccccttattcctgaggggcctagagtctggagggtgtggtagacacacaggacctacatttgggcagctgcaggtgaagggtggtgtctgtggggggagggttgaggatcccaggaaattttgcaggaggtgacagttgatggtgtgctgccttgatggtcactgccatctcatgcatgctctgacctcaggcccatgtgtcagatgaagtgtggtgaaccatgggttgaggaacttccaccgggtcaggatcaggatctgaccttgttggtctcattgtccttcctgtggcgctctctacccacatacctacctcgtgggcagatgccacggattggtttgggttatgcaatcttgtgaccacagtcctccaaagtctctgtccactctttcatttccccaccactcactgtccttgctggcatagcagctggtactggtgatgtaacgtcctcacagtctcagagggcacagcagtgactggaatgtggacctgctgagccctagggccacgagaaatgagtagagggggacttccttggacatcaagtggtacagttttcaacatatccatgcttaggaagacttagtcactgctccaattcagatttcaaaagcttaagggcacaccctgtaagcagctacagtaagaagtgtacacatatcatgggtaggtattagacttagggaaatcaaatgcagtagattagtagcatcagatccccagtagcatggaagtgtcctctgctgcctctgactgcctctgcccccaccccaaagccttccccctgtagagctgtgcacatacatgtcaagccagtgacctggcagataggacgtgagctgacacagcggcttgttgtggagatagatcactgtctgcactgttcgttctgtgcttttgtttgagtggttacactttggggatcatttgctaagtacatgcttgggttgggaagttgggcttgggcttgtgtaattgttaaataatagatataggggagatataggagatataggagaatcaaaagcatagacgaccactgttggggacatggccttgtcactgagagatcacagggtgaggagaagtaatgacagctttgcagcagcatgtctgttgaggggaaagaggctgcaatgcagggacttcaaggaggggcacaagggcacccgaggaacgaggaaggaggaggtagcagagctgtatccattaactttcctcactgccgtgaccacatgcctgagagagtcgacttaagggaggaaggtttcctgggttcctggcttagatggtgtcattcagcatcgaagggagggggcatggcagtcgaggctgctggagcctcttcgtgtttggtggagggagctgagctggcagtgctcactcaacagctgtggcaggcaggcaggctagggctaggactagaagaccttctgagtcgcactcctagtgacactccagctatgcctcctgcctgcaaaggttccacattccccccaaacagcactgatgactattcaaataccaactctggtacataattggtgccctgatacaaacctaaaaggatcccggctgcagggtggcagtcagaagtgctgtcttctcggttccctaaatgttcaagcacatagctcaggagtcattttccatttgttggggtgtgtcactcccagctgaaatgaagcctcattaaggtgacctccctaaaagccaacttagcgttgactggaatgtagcctgtagttgtgtggaggcagggaagatggtttcttttgggatcacctagttgctactgttaaaaatcatctgtgtattttttaataactacacttgtccttgtccaggctttaatcagtgtctgttgacttggtgatgccctcactttaaggcagaagtacctctcagtgccatgtttacaactgctgaaaacatgtcacagttccctggactgacccggtgaggagagcaaaggagtctcaagctacaacacgcaccagacggtttcagttgctgggattttgctgttaatagaaactttttgctggtagagtgggatggggaggagttgttctgtttggtcgtggtcttgaagtccagtggttcaggaccttttctctgtgcttgctatcatttctattcctgaaacttggggcctccttacagtcagctcagaagtcaccccctgcctaggagcagtattttaaaaacctgcctaagcttgtctgatgtctcccgacttagactggcatttgggttgggggcggatgcagttgctactgctggccagggagagtgagaggccagggacagatgctgctcatagtcctgtggctggaagatagcacccatagccaagtagcatcaccagagtccctgcacctacctgcagtctgggagcagggctacagaagcagtgtgagttcctttaattcattgtcctccctaggggaggcttcccttgggagctggaatttggaactagggttggctgcaggaacaggaaaccctttcaaatgatacttacaagtaacccagtggagaaggtccaggcagcacggtaagttctacaaactcagtgtcatcaaggctcctattttctgtgaagctgctgaggactgttagtcgtgccactgagcagccagactgcagtagatcttgatgtgcaagtgaaggtcaatatccctcacctcactacaccagtggaaaaggcctctctgttccatgattggtctggctcaacgtgggcatggtactttcaggataagtgtctcctatatccatcaagactagagactaaagacctgtttccacccagctgagagcagttaaagatggcacccacagcctctcagcctgtgctgaggtagcccagctacagtgggcacagccactatgtttaggtttctggtctggcttttccatgacttttagattcagacactaaatatgtatgcaatcatgtgggccagggcctgcagccttcaaggaggccacttagatggctgatgttcaggttcagttgtgtgccagctctttcccattgaccccagtgcccagcacaggctgggttgctgcacatttgttagattggtgggtggatggagtgttctatcaagagcctgggtctctattaacaccataccctagattatacttctcctatccttgtatgtctgatgcactgcccccatcagagttggtctttttatcaaactcttcatctcccaaactccctatctgtcctctctggtgcccactctttccactgattcattcatactttgttgaatgcttgtaacagggcctaccctgactggaatggctttcttgtcctgggtgttttcctgtctagtgttagcagaatggtttagtttccatggagcccaacaaaaggggaggcccacaaatcagctgctctcagcaggctttcccacgatcatctttgcatactgaaggagacagactctgtaccttaggtaggcatgagagtttaggccaagcaagaggttctgttttggggtttattttaaaatatatattcttttatttttatatgagtacactgtcactgtcttcagacacaccagaagagagcatcagatcccattacaagccaccatgtggttgctgggaattgaactcaggaactctggaagagcaggcagtgctcttaactgctgagccatctctcctgcccccaaagcaggagtttttatatataaaaataaaaaatatataatataatatataatatataaaaaataaagaatataaaagttagagaaacaccttctgttttttaggcatgtactgggtcctggggacacaacagtgaatgtacaaagtgcagcactcacagtgttgtcctctttaacatcatgataggtcttctcagagtggttagaaacttctagaatagtacctgtagagccttctgcatgcatggagaggacctagttagtagagttgttgcaggcatgttcctcccaggcattcacaattagtgtagttgctgtttgagttactctgtacccacagggttgtctgtgtagacacagcatggtataatcgtcctacacttatgacaaaagtatgtttctggagcttagttggtgatgagtatgttgggaatgggtgtgttgagggcctgagttccaccctgagaatccatctgaaaatgctggtgtgttatgtgtatcatgatcccagtgctaaggaggtggaaacaggtccccagggcttgctgggcaacttgcctcacctacctgatgagttctgcacctatgagagactgtgtggaagggggagatggaacatcagctgactattggttatcttctgttttctatatgcacatgtacacatacgtgtgtacatgagcatgtaaacacacagacacactttcctctccagtcaagaattaagaaccagggctgccctggcttcaggccaggattcaagtaactgcctgtctttttccttgctatattggcaaaatggagctggacactgatgcttctggaacaggtaccatcatgctgcagcttctcacctgctggtgccattgctgcacagcccaattgcccattgctgtctgtctctcagcagcctgcaggggacagtgtgtagggactgtctgtctctcggcagcctgcagggggcagtgtgtagggactgtctgtctctcggcagcctgcaggaggcagtgtgtagggactgtctgtctctcggcagcctgcaggaggcagtgtgtagggactgtctgtctctcggcagcctacaggggacagtgtgtagggactgtctgtctctcggcagcctgcaggaggcagtgtgtagggactgtctgtctctcggcagcctgcaggaggcagtgtgtagggactgtcttccggcagcctgcagctgctcagatgtcagctcctaggggttgtatttatgtgatgaatgcttcccggaggcatgtggcacaggggtaatgattattttatttctggttttgaagaagtagacacatggtggtgaatagatgccttctggcttgggagagcttccctgttgtctgcctttggaatggttccagcttcaggaggccttcacatcgtgttagtctctgagccaccacactagaccaggagggctgggagcttttaggttttgttgtttggagctgggcttcaaaagtcttggtttcttaatgaggcagaagaggtggagctgttgctctaagctttgcatctctgcctcagcctctcctagatatagaaaagcgtttcaggcctaaccttgagaggttatctccttgtgctggcagcctcctcccaagagactgtgagtcccaagctctgtgccaggcttcccagccgtggtgactgtcagactgctctactgtctagagctaggaggggcagcctgacttggcagccgtgtggaaacggttttctaggggcagagagacaaggctgtggaaaatgtgtccaatgctgattgatgtcctcaaggacggtgtgacgcttatagtccaggagtggtgaaggaatctcagctctagcatctgagtgctgctggctcagtgacaggggacaggtgcagagcagggagcccaggaaaggtgtggagagaaacaggtgttaaacacctcagttagaagaagaagtcaaaggaaaaacaggcatgtggcttagcaaaaggaagtcatctggtggaaagtttcagtgactgagttgtgtcaccaaattcacctcttctgtagtcacctttgcactaatgtatttatgaagaaaggacaggggaaatgtgaataaggccagtgctggtcactaagcctttcatatgtacagccctccgtgctgtcagactctatttccctatcgataatcccgagttactactatttactatgttccatctgggctgctcttagctccaattgggcagccctcggggccacactctcttgaccttagcccatggcagcttctttttcttcctcctcctcttctgcatgttcgtcctccccgtggtcctaagcccaggaaacctaaaccccacctatgtctcttctgcctagctgttggctattgtcatctttatttactaatcacaattaactggggggcagggtcacagggtctacgtgcagactccaggtctttggggtctgcacttaacgttactatccacagtaaaagacaaaaccctcaacagagctccaaaataaagaagagggactatgatgataatgatggtggcggtggtggtggtggtggtggtgatgatggtggtggtggtgatggtgacaatggcagtagctgcagttgtagtggtttctaaatgcttcccagtgtcaaaaaaatcacttctgttctttacttgaactctgggaacactgacaagaaagtcctttgtttgttgttatttcttatgtgtgcatggtgtgtgtatgtctctgtgtgtctgtctgtctgtgtgtacacgtgcatgctggagcacccctgtagaggccagaggatgactgtatagaatatgtcttttactacattggagcctagtgatctaactcaggttgttagccttgaggaatgaacacttttatgcacttgggtcatctctccagctctgatcagaaaactctaatcacagcttcaagagtagaaggcaacatgtcagactctgttaaagaaaataaaatcatgaaaagtttgggacacttcattgttgagaggaaattctgtgtccaacctagctattcctctgcgtctagcagagcctggggcaccaacaatcccatttagttttctgattcctttggaatcttggccttcattcttcccttgtctcttctcctaaacactcccaggtttgagaagttgtccccaccacctcctcccacttgccttatcttctttatagtgcttgtcctttctgacacatttaatttgcttatgtgattggatactgttcattgactctggatggtctctaagcactgctttttccccgctagggccttgatcagttcagatcactaaatatttattaaatgaatagataagcacacatgcacaggtgaaacttgggttacatatgtccaaattacaggttggatgcatgatgggaaagattctattttgaaaggataacagtgtatttctcagcagccaggagccaaggtgtatctgatctgatcccatattgcaatagaacctccctttcctttttccttcagacatgcagagctgtacttctagtactgggctgggagacctgctagggtcagtttgcctactctgttttgaacaagactttggtttttgtttagctgtttctcttactctcttcaagtgtaaatttatataaaatatattttatatattttattgaaaatgataatttaattgagcagaaaggttttatctcttgaacattgttatataacagagatgacaatgttctgacgtgggacacagggactcccaggcatcaagagtcttactaagcagccttctatgatgggcccagagactgggtgtctgcacattatggccaatggcatctaaacatcttaattggcattgtgattgcttaagaacttcgaggctgaattagagctgaaagtccatatagatcacagaaagaaggagctgggaatggtttaacttacttatgaaacagactttgtgcttgggaggaggtcccgccttggggccatgtttcaatgtcttctctttttctgtttgaaactctgcagcaaggagaaacatatactaagttcttgtcatttagtggaggaaaaactaccaaaccatgttataaggcaggatagcacttgtaacaagcatgtgcacagaaaaatggaggtgtaagttgtccgttcatccagtggagcaccgggtagcgccagactgaagatctgtgtttaggggcagtaatatggatgagtctcctaaacagtgctggaagtcagagatacgaccaaagaagaccagaccccacccaggtgctcttacccacttgaaccctgctgctcacactgtggggtcacagagctgagtctgggaaccatgagaaacttggcaataggaaagtacttgtgaatagcacagtgaccaaaaattaattccgggtccagcatgtaatgagtccagcgtgtttctggcagcattgcctgttgcatacacagcttcacgtgcctcagctttgaacacacagtgtgcatatgtgtgtcaccatatcacacagcactgcttgatgctggaatgctccgctgagactcgagcctgttgtatgctatgaagaatggtgctttcaagggacatggaaggagtttggcactcagatacataaaggcttcatccagaaagacttaataactccctcacaaggcctcagtataaattatatttttgaattgtattgtattagaatgttgaatttcaaagattgctgtttgggttgttgatgtgagtttcatgaagaaccctcatgaattttgggtcgaaattaggattttctaataatttctgaaatgactcttgtcctgcttctgccattctgtatggtatatttatgcctggtcttgtcagtgttgatagtcataataggtaaatattggacaactctgaagactgttgaagatgttctaggtcccactctattgaacattcagacaggattccatgctttatgtaaatgcagacagcaatccatctcattagcagtgcaagtttgattttatctttcacaaatgggaagactttatgtatactaaagaataaatgttttaaaattatttcttgcaaatgtttaacctgtaagcctatgttatgttcctgtatgttttgggtcacgtagaaaattctccaacaggtaaattctgcagatagagagcttgggaagcccgcctttatccacttcaggaggcactgctgtgttctctctgctggtagtgtggggctgatgaggctcaaggaaggcatcaagaccacaggaccaacccttggcactggctagagaccattacaatgttttagttgtttctcactttaacattccagtaatcagttgctgtgcaccagcttctgatgttatgacaagtaactgtcagatcctccaagctcactatgctgtttatacatgtctatttccacctcgggctctacccccaaggatcaccctatgtgtgtcacaaggtctccctgccagcattgtagagctaaggggaggtcctcagctagtgtgtcccgttatcatggtgaagggaaaaaagaagttggcaagccatgcttaggcattggaggcctctgctcggaagtgacaaggtagcatccctccacagatctcattagattagtgataagaaaccagcacacctgatcttcccatgggtaggactctccaggaggggatctgagccaccaaaggaatctaatataatataatctacctcagcaagcaatgctcactgtagaaatatcacagaagatgggaagatattatatagccattaaatagagttgtagatctcacagattagcttgcaaagttatttattacacatgccaaaatgggaaaaaacaaaaatgcaattggagaatttatagtctattccaagtttttcaaaagtaaaaaaaaatgcatatagtagtataggaaatgaaatggaaaaatggagctgtgtgcatagctcagatgtaaaagaatccatttggcttctcagggtgaccaactgtcagcacatgggacttcagactgcctgagtcacacagaatgagttctcattttaataacagcctggatttgaatgttaaaaccgcctccttttaaatgttagaagctaaacaggcttttaaaaaagcagtatgatatttaagtttacaacagataggaaccaaaatatttcactaatcagaggaaatattttgattcctatctgttctattttttgtttaaaaaaaaagtaactagtttgaggatactcaactttattttcttactttatcctcaaactagttacctttttttaatcaaaaagaataataaaggaagcaagatactaagcagctcagaatggtagctgtattcccagcactaaggctgacactgacacaggaggattgccatgagttctaggctaatctgaactacatagtaagtttcagaaccacatggcctaaaaagtgagactttgtccctaaatcaattaactaattcaatcaatttaattaatcatttaatgaaaggtgagaatacctttactgcaagattcactatgtgaatctctgctcagttgatcatggtgtttaattaagcaggaaatgtgatcttggcaaagctttggtcatacttgttgtgctccataatgaagggaaatacaagtaccaatctatgctcacagtcatgaaaagcagaaccaaccacaatgaagaaaagggaagaggtcctaagggcttgctgatgcagcatcaagtgactctgctgacacatggacacgtgtcctcctgaaagcggcttaatggcctggaaggagcccattgattctcatagcagtggctcaggaaaatcaggcctatgatattgtgtcgctccagtccagtagttagccacagtgtagcccctgcagctgctccctaccaggtgaagtacaggcatgcacgtgggaggggctgtgaatggcagtggaggagggaattgagtttaatatgcactgttgaatattcaggtttctttccctttctcacacaagtctaaccccctcccttcctcagcaccatcttgcaaatgcagccttgcctctacaccaaacacataatcaaaacaaggttttaagctgcaaataagtttaatagaaaaggaaattagtcacttcaaaaaaaaaatcaacagagaccatttggacatttgaaagtcttggattagccttaatcagcccccagcagtgcctgttcccagcgtggaagtcaggtagggtgcagcccttgctggcagcagacaatttctcaaaaagaagaaaagacagacaaaagttaaaactgtcaaaattagtgtgtggttgtcatacagaaattgggaagttagaggaccagaaagaactcagttccctacaaagacagcactgcagtgagagcctgcaggccttttctacattctcctcctgagatggtctccctcacctgtgaaaatgtgcacccttcttaacatagaaattggctcaccatgctgcacctcatgtccaggtcaccactgccagtgtgtgtagcacagctgggtgatgggggcacaattccttccttgtgcattttattctgcattcttactgtcatgaacatttctgggagccataacgactttcatgcccagtctggttttttccctcctttcttccctatagataaatttgtggcttggggaccgggctgctgtgtgatattttagaaagtcagagttctggagaagagagacaccccccccaaccctgtcacagtgggcaatttatttattgatgcttaaaatgactgcacacgtttatccccatgtgtgcagtatgtaccctggtgtgcatgtggaggccagaggagttccagtcagttccctccttccactgtgtggaccctcagtcttggcagcaaacacatttacatattaaatgtgcctgttttcttcatgcacataattggaacagtgccactgattttgcagggtcattataactgtgagtctgatgtaggggcactcgcttatcccagtacttcagtagactgaggcaggaagtctctaagttcaaggccggtggggctgcacagcagtttcaggctggccagctacatggtgagatctgtctcaagaaaccagagtaatgattatgatagcagtgaccctgcggctctgggctccggaaggcacatctgcggctctggaaggcacatctgtggctctggaaggcacatctgcggctctggaaggcacatctgcggctctggaaggcacatctgcggctctggaaggcacatctgtggctctggaaggcacatctgtggctctgggctctggaaggcacatctgtggctctgggctctggaaggcacatctgtggctctggaaggcacatctgtggctctgggctctggaaggcacatctgtggctctggaaggcacatctgcggctctggaaggcacatctgcggctctggaaggcacatctgcggctctggaaggcacatctgtggctctggaaggcacatctgtggctctgggctctggaaggcacatctgtggctctgggctctggaaggcacatctgtggctctggaaggcacatctgtggctctgggctctggaaggcacatctgcggctctggaaggcacatctgcggctctggaaggcacatctgcagctctggaaggcacatctgcggctctggaaggcacatctgcggctctggaaggcacatctgcggctctggaaggcacatctgcggctctggaaggcacatctgcggctctggaaggcacatctgcggctctggaaggcacatctgtggctctggaaggcacatcagctggtaggtactgtgctgtcaggaatctagggactgagtagccgtgggcctggaatcagacagacctgatttggaatcaatcacttctgagttcgcatctcaaatttgtcccacgatagtaatttgctctgtgataagttaacatttctgagctatagtttgtttatgtagaatggggatcagccacaacatttatggaggtttgaaaaatgagcaaaatgatgtgatctggaattcacttacctatactgtctgttctgtacgcattgcagctagccatactgttactgatcactttgtatgcgtgtgcaagcacatttttaaatgtgaatatgtatgcatctttctctcttgctctccactttgtatttagagatggggtctcatcttgaatccagagctcatttgtttggctagattgtttggttagtgagccctgaagatcttgctcagtgctagatggacacacaccaccacatccacttttccatgggtgctgccgagcacatcccaggtcctcatgcttgcacagtgggcactttactctccagccacacattggccacacagttccacagaggagctgtgcaggagctaacgtggaagaatcgaggggtgcctcactcttggagagcagtggtagtgattttaggtcgtcctgggggagtgttccatgtactgcctgtaatgctgagttgggaccagtcagcagagaagcacagcagaggacacagtatggtcctgtccagagaagagggcagggctgggaccaatgaatgggggagttggaggaatgaccagaaccaagctatggtgtcaagactgtgtggccaagagtagcacccagctccccaagccctgggacctatgagggggaaggtggcatgttattagattgttgtttccttggagactgaaacttttattgtttaatgttgaagatattgatctacaaggtgggaatggtgattccagctctgtggtataatgaaaaaaatgtaactttcatggaatccataaaaagtaaaatagacattctttaaaaaaaaaaaaaagcaagcttgatctttgataaaatcttccagaaagtgggtctgtccatgttatataaagagtaagttttctcttctgaactaagtcaagtcaagaagtggtcaacccgtatctctttcttagtgttaggagctgctgccctcagtatcttgctgttgcccaaacccttgagcaacaaggccaggcaggactcacagcacagggatagctcataggctactttctggaagttctttcatccattcatcccattttccaaccaaccactgagcctgctaacatggatatggaaggcctttgagcctggcttatgccaatgaagctagccaggtaagatgcctgctcctcaggaatgtgtatatgccagtgaccatctagcatagcaaagctattcatcactgactctggaaagaaagtggcacaggatgggggatgagggacggagcattgtgggaaaggttactttaggtgagatggtcagggaaggcctcttttcactgatagggaagaacaaatcagaactaagtgggagagacttcattgtagaaagtcctctgcaatggggagtgtctgcaggcagtgttacagtagtttgcatccatatcttctaagcttttgtcttctgagcatctgaggagctgatgatgtttgggggtagttgccatctgttgggagccgcccccacattcgccgttacaagatggcgctgacatcctgtgttctaagtggtaaacaaataatctgcgcatgtgccaagggtatcttatgactacttgtgctctgccttccccgtgacgtcaactcggccgatgggctgcagccaatcaaggagtgacacgtccgaggcgaaggagaatgctccttaagagggacggggttttcgttctctctctctcttgcttcgctctctggcttctctctcttgcttctctctcttgcttctctctctcttgcttcttgctctcttttcctgaagatgtaagaataaagctttgccgcagaagattctggtctgtggtgttcttcctggccggtcgtgagaacgcgtcgaataacaattggtgccgaaacccgggacgagaaaatccgggacgagaaaaaactccggactggcgcaggagggatacttcattccagaaccagaactgcgaatcaaggttataaggttcccgtaacacagactgttgagaaggattcaactgccgaattcagaactcatcagctggggaacgacggtgataaaggttcccgtaaagcagactgttgagaaggattcaactgccgaattcagaactcatcagctggggaacgacggtgataaaggttcccgtaaagcagactgttaagaaggattcaactgtatgaattcagaacttttcagctggggaacgaggtaagtctgatcttgaactttctaaggaaattcaggacagtctatcagaagtaaagtggaaaatgtttggccttgaattttttctagtgttaggagcccttttgttccttttcacatgttatatagtgcttaaggcagggctaaaaattctagaggaaattcaggacagtctatcagaagtaaagcggagagagagagtaggaacaaggagaaacggtaagtatacaggcctttccaagggtcttgaacccgaggaaaagttaaggttaggtaggaatacctggagagagattagaagaaaaagaggaaaaagggagaagaaaaaagatcgattagcggaggtctctaggagatactcgtcactagatgagctcaggaagccagctcttagtagttctgaagcagatgaagaatcctcctctgaggaaacagactgggaggaagaagcagcccattaccagccagctaatcggtcaagaaaaaagccaaaagcggctggcgaaggccagtttgctaattggcctcagggcaatcggctaccaggtgcactcccgccctatgcggagtccccgccctgcgtagtgcgtcagcccgtagtgcgtcagcaatgcgcagagaggcagtgcgcagaaaggcagtgcgcagactcattcattccccgagaggaacaaaggaaaatacaacaggcatttccagtctttgaaggagccgagggtgggcgtgtccacgctccggtagaatatgtgcagattaaatatggaatcaatgctaattttaccttggtgcagttagacaggcttgccagcatggcactaactcctgccgactggcaaatgattgcaaaagccgctctccctagtatggccaaatatgtggaatggcgagctctgtggcaggaggcggcacaggcgcaggaccgagcaaacgctgctgctttaactccagagcagagagagtggacttttgatttgttaacgggtcagagagcttattctgctgaacctgataagaggtatcaatggaaggtcttaccacagggaatgtccaatagtcctactatgtgccagctttatgtgcaaaaagctcttttgccaatgaggaaacagttcccctctttaattttgctcctttacatggatgacatcctcctgtgccataaagaccttaccatgctacaaaaggcatatccttttctacttaaaactttaagtcagtggggtttacagatagccacagaaaaggtccaaatttctgatacaggacaattcttgggctctgtggtgtccccagataagattgtgccccaaaaggtagagataagaagagatcacctccataccttaaatgattttcaaaagctgttgggagatattaattggcttagaccttttttaaagattccttccgctgagttaaggcctttgtttagtattttagaaggagatcctcatatctcctcccctaggactcttactctagctgctaaccaggccttacaaaaggtagaaaaggccttacagaatgcacaattacaacgtattgaggattcgcaacctttcagtttgtgtgtctttaagacagcacaattgccaaccgcagttttgtggcagaatgggccattgttgtggatccatccaaacgtatccccagctaaaataatagattggtatcctgatgcaattgcacagcttgcccttaaaggtctaaaagcagcaatcacccactttgggcaaagtccatatcttttaattgtaccttataccgctgcacaggttcaaaccttggcagccacatctaatgattgggcagttttagttacctccttttcaggaaaaatagataaccattatccaaaacatccaatcttacagtttgcccaaaatcaatctgttgtgtttccacaaataacagtaagaaacccacttaaaaatgggattgtggtatatactgatggatcaaaaactggcataggtgcctatgtggctaatggtaaagtggtatccaaacaatataatgaaaattcaccgcaagtggtagaatgtttagtggtcttagaagttttaaaaacctttttagaaccccttaatattgtgtcagattcctgttatgtggtaaatgcagtaaatcttttagaagtggctggagtgattaagccttccagtagagttgccaatatttttcagcagatacaattagttttgttatctagaagatctcctgtttatattactcatgttagagcccattcaggcctacctggccccatggctctgggaaatgatttggcagataaggccactaaagtggtggctgctgccctatcatccccggtagaggctgcaagaaattttcataacaattttcatgtgacggctgaaacattacgcagtcgtttctccttgacaagaaaagaagcccgtgacattgttactcaatgtcaaagctgctgtgagttcttgccagttcctcatgtgggaattaatccacgcggtattcgacctctacaggtctggcaaatggatgttacacatgtttcttcctttggaaaacttcaatatctccatgtgtccattgacacatgttctggcatcatgtttgcctctccgttaaccggagaaaaagcctcacatgtgattcaacattgtcttgaggcatggagtgcttgggggaaacccagactccttaagactgataatggatacgtctcaaaaattccagcagttctgccgtcagatggacgtaacccacctgactggacttccgtacaaccctcaaggacagggtattgttgagcgtgcgcatcgcaccctcaaagcctatcttataaaacagaagaggggaacttttgaggagactgtaccccgagcaccaagagtgtcggtgtctttggcactctttacactcaattttttaaatattgataataaatggtatggcccggatcctatcttgataagatccaggggagctatctgtgttttcccacagaatgaagacaacccattttgggtaccagaaagactcacccgaaaaatccagactgaccaagggaatactaatgtccctcgtcttggtaatgtccagggcgtcaataataaagagaaagcagcgttgggggataatgtcgacatttccactcccaatgacggtgatgtataatgctcaagtattctcctgctttttaccactaactgggaactgggtttggccttaattcagacagccttggctctgtctggacaggtccagatgactgacaccattaacactttgtcagcctcagtgactacagtcatagatgaacaggcctcagctaatgtcaagatacagagaggtctcatgctggttaatcaactcatagatcttgtccagatacaactagatgtattatgacaaataactcagcagggatgtgaacaaaagtttccgggattgtgtgttatttccattcagtatgttaaatttactagggcagctaatttgtcaaaaagtctttttcagtatatgttacagaattggatggctgaatttgaacagacccttcgaggcttgccatcattcaggtcaactccacgcgcttggacctgtccctgaccaaaggattacccaattggatctcctcagcattttctttctttaaaaaatgggtgggattaatattatttggagatacactttgctgtggattagtgttgcttctttgattggtctgtaagcttaaggcctaaactaggagagacaaggtggttattgcccaggcgcttgcaggactagaacatggagcttcccctgatatatctatgcttaggcaataggtcgctggccactcagctcttatatctcacgaggctagtctcattgcacgagatagagtgagtgtgcttcagcagcccgagagagttgcaaggctaagcactgcaatggaaaggctctgcggcatatatgagcctattctagggagacatgtcatctttcatgaaggttcagtgtcctagttcccttcccccaggcaaaacgacacgggagcaggtcagggttgctctgggtaaaagcctgtaagcctaagagctaatcctgtacatggctcctttacctacacactggggatttgacctctatctccactctcattaatatgggtggcctatttgctcttattaaaagaaaaaggggggannnnnnnnnnnnnnnnnnnnnnnnnnnnnnnnnnnnnnnnnnnnnnnnnnnnnnnnnnnnnnnnnnnnnnnnnnnnnnnnnnnnnnnnnnnnnnnnnnnnnnnnnnnnnnnnnnnnnnnnnnnnnnnnnnnnnnnnnnnnnnnnnnnnnnnnnnnnnnnnnnnnnnnnnnnnnnnnnnnnnnnnnnnnnnnnnnnnnnnnnnnnnnnnnnnnnnnnnnnnnnnnnnnnnnnnnnnnnnnnnnnnnnnnnnnnnnnnnnnnnnnnnnnnnnnnnnnnnnnnnnnnnnnnnnnnnnnnnnnnnnnnnnnnnnnnnnnnnnnnnnnnnnnnnnnnnnnnnnnnnnnnnnnnnnnnnnnnnnnnnnnnnnnnnnnnnnnnnnnnnnnnnnnnnnnnnnnnnnnnnnnnnnnnnnnnnnnnnnnnnnnnnnnnnnnnnnnnnnnnnnnnnnnnnnnnnnnnnnnnnnnnnnnnnnnnnnnnnnnnnnnnnnnnnnnnnnnnnnnnnnnnnnnnnnnnnnnnnnnnnnnnnnnnnnnnnnnnnnnnnnnnnnnnnnnnnnnnnnnnnnnnnnnnnnnnnnnnnnnnnnnnnnnnnnnnnnnnnnnnnnnnnnnnnnnnnnnnnnnnnnnnnnnnnnnnnnnnnnnnnnnnnnnnnnnnnnnnnnnnnnnnnnnnnnnnnnnnnnnnnnnnnnnnnnnnnnnnnnnnnnnnnnnnnnnnnnnnnnnnnnnnnnnnnnnnnnnnnnnnnnnnnnnnnnnnnnnnnnnnnnnnnnnnnnnnnnnnnnnnnnnnnnnnnnnnnnnnnnnnnnnnnnnnnnnnnnnnnnnnnnnnnnnnnnnnnnnnnnnnnnnnnnnnnnnnnnnnnnnnnnnnnnnnnnnnnnnnnnnnnnnnnnnnnnnnnnnnnnnnnnnnnnnnnnnnnnnnnnnnnnnnnnnnnnnnnnnnnnnnnnnnnnnnnnnnnnnnnnnnnnnnnnnnnnnnnnnnnnnnnnnnnnnnnnnnnnnnnnnnnnnnnnnnnnnnnnnnnnnnnnnnnnnnnnnnnnnnnnnnnnnnnnnnnnnnnnnnnnnnnnnnnnnnnnnnnnnnnnnnnnnnnnnnnnnnnnnnnnnnnnnnnnnnnnnnnnnnnnnnnnnnnnnnnnnnnnnnnnnnnnnnnnnnnnnnnnnnnnnnnnnnnnnnnnnnnnnnnnnnnnnnnnnnnnnnnnnnnnnnnnnnnnnnnnnnnnnnnnnnnnnnnnnnnnnnnnnnnnnnnnnnnnnnnnnnnnnnnnnnnnnnnnnnnnnnnnnnnnnnnnnnnnnnnnnnnnnnnnnnnnnnnnnnnnnnnnnnnnnnnnnnnnnnnnnnnnnnnnnnnnnnnnnnnnnnnnnnnnnnnnnnnnnnnnnnnnnnnnnnnnnnnnnnnnnnnnnnnnnnnnnnnnagaaagtaggtagaggtgaaatgggtaagatggtctgaagtacaaggggacactgtgtgagtcagccttccatcagtacaacaaagaactagagacagtcaattcatgaaggaattatttgggctcatgattttggagtttcactacatggtcagttggaatgagagaggaagaaaggaggaggaaggcttccatctcccttttgagggctggatgaccttaaatgtccatgtcttccccacatcttcagaacttcaccagctcacagtggagaccaagcctttactatgtggggcgttaggggcattcatgaaccccactgtgttctgctgggaaggtatttctgagaacttttgaaattaaaaacagaaagaaaaggaaggctctggagggggtggtgtggaggctgagaatactgggaatactgagaatactgaaaacactgagaatactgggaatactgggaatactgggaatactgagaatactgggaatactgggaacactgagaatactgggaatactgggaacactgggaatactgggaatactgagaatactgagaatactgggaatactgggaacactgagaatactgggaatactgggaacactgggaatactgggaatactgggaacactgagaatactgggaatactgagaatactgggaatactgagaacactgggaatactgggaacactgagaatactgggaatactgggaacactgagaatactgagaatactgggaacactgagaatactgggaatactgagaatactgagaatactgagaacactgagaatactgggaacactgagaatactgggaatactgggaacactgagaatactgagaatactgggaacactgagaatactgggaatactgggaacactgggaatactgggaatactgggaacactgagaatactgggaatactgagaatactgggaatactgagaatactgggaatactgggaacactgagaatactgagaatactgggaacactgagaatactgggaatagtgagaatactgaaaacactgagaatactgggaatactgggaacactgagaatactgggaatactgagaatactgagaatactgggaacactgagaatactgggaatactgagaatactgggaatactgggaatactgagaatactgggaatactgggaacactgagaatactgggaatactgggaatactgagaatactgggaacactgagaatactgaaaacactgagaatactgagagagaatactgagaataccaagaatactgggaatactgagaatactgagaatactgagaacactgagaatactgggaacactgagaatactgggaatactgggaacactgagaatactgagaatactgggaatactaagaatactgacaatactgaggaggatcctgagaatcctggcccctgttgcaaagaacctagggtcagtttctgtctctccttggcccccagtcatcttctgggtggctccttcttctgatatccacaggtaccacacacacacacacacacacacacacacacacacacacacacacaggcaaaacactcagacacataacataaagtaaacaaatctctccttaaaagtaaaaagagaaagtaatgtgtagagggggcactggagtctacatagatgattctcctgcctcaggtttaattggagttatacatcctacagaaagtcttcggataggagggatgggcagagaaaatgcccctttggcttccttgtcttttctgcaaatagttctaaatcccagagctgataaggaggagttgctcgacaccccactcctgcctcagttgtttttaactctttcctcaactacttggacctgagtttggtctgtgcctcagggcctctgcctcctgcatgccttgcttgctctgtcctttgcctcattcctgggaccttggctctggttgtccttacagccactttccatactggtccccgtgccctgtaccacttgatgaaggctgaatggaaagtccccctgatggtgttatttcatgctctttgacatgctagagaacaagtgtttgagccctggattcaaatgctttgacttcagcccatccaatcaacttccggatggtcttgggcaacctgtttgacctctctgaacctcagtttcctttcctttcaagtagagacaataatggaggtcataagataatagagcttgctgaccagatccctgcagcacagcaaacattaggcagctgctttcgtttttctgtttgactaaagtaggaagtagaaacacttgggctttggggacagctactagtggtactctgattttagagcagggtatctggtgacctggaattaggtgtggtccaggcctaggagagaggagagattcatcctttctcttaatcctgcttcagggccagggaagtatgccaagagatgaccccactccagtagaaccttctggcgatgcccacagtgccagttccttttataacagccccggggtgcctggtagtgatggtgcacacctttaatcccagcacttgagaggcagaggcagaggcaggtagatctctgtgagtttaaggctagcctgatctacagagtgagttccagaatagcagagctaccaagagaaaccctgtctcaaaaaaacaaaacaaaacaaatcaacaaaacaaaacaaaaacccaccaccaccaataaagaaaaccaaaaaaaacccaaacagctgatggggcaattggattttctctgccacctgcacctggctgaccagcacaattacagacaggcctggcagactcccagatgcagtgctgtggggctttcatgcttgtttatggtgaagagaagtgggatgtctctctcccacatttggaagtcaatgtggggtagtacctggaaggagccggctggtactctccaaggtagagaaccgaaggtcttggcaagagcacgcttcaaccaggcatgtgttccttaacatctcaaactgttgtctttccagtttaaaaaattgccccacttgctagaaaggtagcaatgggatagtcaaacctttacattgaacagcaccttgactccaggccttcttgcagtgcccttgggagcctccttgagcagaggttatgtgcaaggtcccaaggacatggcagagggatctggtcactgccttggccaccacatccttaccagcactgttaccctcctctgaagctcattggttcagaacccagcacagtcatgaatatttctcctttaactgacaggtacttctccatttgggaggagcaggatctgggcagtctgtctagattgcttaggctttgagtctctgtaacaatgatagtgtgtctttgagcttctgcagtcatccactatcttcagctccctgaacagagcacagtgtgccaccttcaatgaagacactaagtgccaatccctctgccctctaggcctatgcaagttgggctgacagactgaattacacctggttggtcattggggttggagttagcatcagccttgctcacggggtggcagctacaatcagttggcagctggcatgaggtgctcagctacggcccctcttggtcccaatagttttattttagtgaagcagatgtaactccactaatcttccagagcggctgaactgcctccttggcactgcccaagagtgctgccgtactgtgctaggagccacgctggcacaggctttcatggagagctcacagacaggcatttctattctaggaaagagaaagaaataaacagaggaacacagtgctgtttttagtgcaaggagtcagcagctgcttggagaggggatggtgcgtgacatttccatgagcaaggtgtgccttggtggaggtggtgcgagcacctggccactttccttgccggatgccttttcaggagtcgtcaccattgctcagacaggccttcgtccttctgactgctcacaggacacaccaggctcaggactcagggtggccgagcagcttctctgagccctgtttttccttggaaggattgtagactgcagccaacaatttgctactttgtgagttcttttgtctcccacccttctccaccttttccccaccctttcaacccttaatacttgatagagagaaaaaaaatagagagacaggggggcaacattattattagactacttcctgtgactaggaacttagagttccttgaggcaagtttgatattggctgtccaattttcttcttctttgtgaatgactatttaacaaaccacaactaacaacaaccaaccaacaatcgacaaccaacaacccatcccgcctctccagagccctaacatttatttatataccctctgaaaagtcatagttgcaaaaaccatctgctgctggcaaaatcgctcccctgggagaacactaggcaaggcatagctgctgtggacagtctgagtcagccccatacccacggcagagagtaaaacaaaacacattcttatttctgtgggttgttttttctttttcctaaagaaaccagaattatcactatagcagacaggcaatccctgcccacaggaatgttatcattctgataccctgtctgtctcctgaccttagctaaggctcttgcttctctacctcttgctttctctgtctttgactatgaggggcaggacaggatttatccgcatcccacttgggcctgacaactgaatatattagaggaagctgttagccttgagggtctggacctgtcatgagtctaagctagaatgcaaatgggcagatagtaagttcagcaaaactgtgtatgctagatgtggtggcacacgcctttaatcccagcacttgggaggcagaggcaggtggatcactgtgagttcgaaacaagtctggtctacatagaaagtttcaggccaggcattcaaaataagtcactgtctcaataaaacaaaacaaaatccccaacagacaaacaaacaagaccatgtgtttattgaacccctatattgcttcaacatagccaaaacaagtatttcttccttcctcgtactgttttcctgctctcctgcttacatgtctgcctccactctctcacacatttactcttttacctcctcagagcggtcacagggtgccacatctgtgctcagtgccaggatggagcagatggtctgagtccctgtactctttctcctgtctgatggcgagaggatctgtactcaggctatcaagaggcaggccatacatcgtcagtgtgtggagaggaccctgggaccacaagctgcatagcagcttatgcctggtgtttgtacggaagacagtctctagccacaaatctgaaatactaggcaaagagagcaaggggcaagggaggggcagtcagtgtgcagggactgtattgtcggttgttgatctgctcttttcacccatgtgacgctggtgcctcccagagacagcacttcaactgacaccatccagaactgactaaaagcaccccttttctgtgttcagagcaagcccagagacatacttgctgccagcacgtacacgttggtatgatagataggccttctcccatctgggggcacaccttcctgggagccttgctgggcttccttggagctgtacaagctctgcctttgagctcagcccacccactgtcaggtccagtcctgctctttgtgtttctcattccttggtggtggcatccagagggcctgagactgaaccagttgtctgaccctgccagaggggtcagacagtgagggaggagagccttggaggcttggatctgctcgcttcttcctttccccctttggataggtggcttcaggatagtgactgctgatgcttgcacccccacagcattctatagacccttgcatccttccatctccacagtgtgttcacctgacttaaacctacctggagctctgcactcattcctctgctttgttttcttcttcttggtcccagccattcctctttcactttggcctctctgctcccatctataaacgcctctctctctggcaggccttggcttctcggaatcatctgaggctcagtacctttgagatggattttgagcctggcaaacaaaggaatgaatgaaaaaatgaaaaggagaggggggatggggaagggggagaaagtacttacctcattaggaaggagctttgtctggtgaccctgagcgagccacttcacctgatgaaaggtggcctcagtgcaggccttcttctgcagagcttctcctctgcagcctcttagctccttccctgacctttctacccatccctatatatcatccactgggtgctaactggacacaaaccctttacgcttggggaactacaccagagtgcctgatgcttccactatgtaaataaggattggaagctggaggggtgatgtgctttgtgagcatgtgtggggagtgctagccctctagacaggcagactcctcactcttccatcacacgccctgtcagctggaacccctgacatgcggctggaatggtggcttctctttgagatgctatgcctcttggtttgtaggcacactcattgattgattaattcatggcgctgaggatggaactcaggaccttgtacacactaggcaagtgtgtatctgccctcagtggtaccccagtcctttctccttccattcactgaggcaaggaaatgcctttcagcatctgcacctcacatcttgagtgcacagcacagtcagtaattattgcttattatcaggtggcatatttctcgtatcaacctcctttaattgaatgggtaattcaggattgatccagccctttaagaggcaccattatgtgctcactgagcagagaagagtcaaaagagatcatgaagaacatttgtcaccgcagtgctagtgggactattccagtttacagcagtcaactgaggacaggattccttataggcttctgtggggtggaattaacacatgtggtagctttgctgacatagggcagaatcagccacgtgtggtaattgcatgtgtcctgcctctcactaaggagcagtcagcacttttgtcccctcatggtgggcttgcagtgtttgcccatttgctgtgtgtgtgtgcaggtatgcacttacacatggagcacagaatgttctctgactccctaagtcagtgacaagccagtcagtccatctgatcaccgactgttcccagtggccctccatgctaatgtgagccatcaggaagggtggtgggttctttaccctacctttgtgatattcttagaacttcaagttttattttacctggattctccctccctccctagccccaaccccagccagcttttatgtcccagtggatgaagtatctcctcttccatgtctccatggcttgcttgtttgttcctgtgtcacaggggctttggcttggagatgttcgagatcaagtgtggctttgggtcatttactgcatcccctgcctgttggcagttgacctcagacaaataacaaaagaatcaagtaagtgatctagacgcccttggagccagccctggttgaactaggctgtcaaggtgaacgagctgccatgtatttattctgctttattccatagggtctatcaatttctgtgatttttcttttaatggagcaaggtttaatgtttaaataaatactagaaatcagcaccattccctcaaaactttgactctcaaagcattgggatggttgaatccagcctgtggaggcatgagtgttaccacctgggtgcttctccaccttgctttctcctgtctattggcacaaacacacattaacagggattctaaaaaatataaagaataaattttcctggcatccagctgggaatgagaactttacagactagttctcacctctgctcaaatctctgtcttttaactatggaaatgaaatcccagaaaaaccactggacagagtagagattacacaattgaaagggagtggtgttcactggcagctggattgcctggctcagaaagtaaatcaatttcatcttgttagcgcaggagaccagtggcccagggctataattggatgctttttgaaaactgcctgtctgagctccggtgcagttttatggagaaggcgttcagctcttgctccggttttccaggtggctcctgaggttgctttcatgagcttagggcacttcattttactgaacaaaagctaaaacagcaaccccacataagagggccctcctcattggcgtgcttgtcgggagggtagtggggaggactctcgacccaagattcatgggtaccacattaggaactcttgtcattagggcaggtaagtggcacaagtgtgaggctgctggtcacctggcatctacattctggaagcagagattaaaaacttgtgttcagcttatttcttgttttctcagtcttagattccagcccatggcatggggtcaccagtgcatttaatacacaccccccacctcagttaatttactcaatacaatccctcacagaatttctcagaaatgtgctgaataattctagaccctgacaagctgacaatgttacctctctgggcatctaagataaaagctccccaaatcaagtgagaaaggctgagactactgtcatggaaggccagcatcctgagcaccatgagcaccaggcggcagcagtgatgccattagcccatttgatagagggatagagcttccgagatgtcacacaagccacttgagattatatagcttgcaccttaccaaaccaacattcctctgcaggtgcacctccttccagaggtctttgcagtcagcctgcttgtcccttgccccaagccccaactcactgctctcatttccactactgtggccttcttgtggccacaatggagacaccagcatttgtttgtttaatatgactcagaagtggagctcagggaaggatccacagcccacagaagcaggtacatggctgtgatccgtttgtccagtaaagaggcagctgaagaggaactgggcagccacattacgcatcaagtgtcatgattagcaaggcagatgtcattttaaacaggatgtttgccttcttcaatgggataggatctgcagcctccagtgtggcaccctctgtcctcgagtaggagaaccctaggcatactgactgttgtacttattcatctaaccctcccactgcccagggcctagcactagagtccagaccccagtactccctgtctgccacatccctacagattagtctcatgaacatgggttccagacccccactatgataggaactgtggctcctggctgcctgctaagctcagacttccttttcttagatggcagcattcttggtgctgagagaagtgttgtggttaggaatctttgcagctgtgtggccactgtatagtgctgctgtagtcagtggtggcaatttatgcagttgatcccctgatgagctgagggctgccagagtgtggctgtgacctgctcagtagtattcactcttcaaagatgccctgtaccacagcttttaaggcctgattgtatcactacatccaggatactcacagccaacctggctttgctggctgcctcctacccttccctaataggggcataatgtgtcactgtggacagctacccacatggtctttctgggtttgcttctaggaagggccagtccccaggtactgggctgtgggaagttcttgccgagccttacttttgtcatctataagatgggataattgcacccacctcatgaaatggttaagaaacttaagtgagatagatacaacattgatgaggtacttcctaggcaagtggctgaacctctctgagacagtttccttccgtgattcccaaggagatgttgttatggagggtaccagtgctcccgacacccaaggaatcctaggaagggatgttgtaaataccccacaatgcatgtgaatctacaccataaggaattaccccatccaaaatgtaacagcgccgagtcaggaggtgctgagtgtcttccaaagaactgtggaagaatgctgttgatgccatgggctgagctgtccagaaagggcacctgccctccagctggggcaatgaaggtcttctcagagcaccccacaccctgcttggagaaggggaggtcaagggagtagccagccaggcttccagttccccatcttacagtgaactgaggtgggaggagggcaccttacctgggaactggttcctgcatctctccctagtgtagctatgccggtgctggggtgctagtgaggctgtggtcagtattgttaggatgggcactgtgaccctcctcccatagatattcacaggcctaaccttcaacattgagtggttaaataaaacagtgtcttattctaatgttggctatcatttcttttattgtttctgagcccttttgctagtaagagtgctgccttgaccttggaaatggccttcgtttttgcaagtggcttaagttttatccttcctcgggccctagggggcagagacacagaagatcctcaaaagtaaagctcagatcacatgacccagaggcagtgtgtgttccctatacaggtacaagcccccaaggcacacacagaattttacaagcgttctgaccccagaaagcctctatctgatgcaatgatatggtttcagcagagtcctgtgctctcgtgcccccaggccctattgccttgtgacttagttaggaaaggaagagagagagttggtgtcattcctctctggaccagcattcctctgcactctgggaggcctgctcattcactgggccagttgttcctctcctacaccaaagccaccagttcatgcagaccctctgtctcgctgagatcggcagccagctcagggctcagtaagactttagtctacatctggaattttctttttttcttttttcttgtgtgtatgtttgcatgtatatatcctcatacatttatgtgggtccgaggacacccttgggtgttggttcttgccttccacttgatttgatccagggcctcattactgtttttccacgtcatgtgtagactaacaagattctgggattttcctgcctgtgcctctcatctccccattggaaagtgctgggtctaggaagactatacatgtctggctcaggctctggggatttgaactcgagttctcaacttgtgtggcactgcgtgactttaccagctctccatctggtgttttctaaagcacccactgctcttggccttgtgggctgggcctttcacactcaggcctgtgctagccaaggccaaggccacttctgcttgccctgtggacaccattgtcagttgtggctgtgactgacctctaggtggcaatggctgcctgctctgtaggttcctctgccatcccagaaagaacttatctctcttcgtgcagcacagtagccagcactcctaaattattccctctgtaaatttggttaacaccctttgctccctttgtctcagtcgataagtttcaaactccaaattttcactgtgtgagtagcaggtgacctcattcccatgtgtcctgtaaactctgtgcagagggtgaggggagggtcccacaagatctcttccttggcaggcagcatcagcatgggcagacatagcttcggcaggtaggtaccagcagggaccctgctaattccatctgtctgcttcctgcccgcatccttgtcttcctgaatccctctctcgtccgttcatccatctcccttcccaccaactacctccagggatgtattgctgccaggagcaccaaacaccagtcctttctccccattgtctggaagaggtcagaggcatttgcacagtcacacatgcagcagatgtcagtgtgcccatttgttcattccctttgaaaggcatccattgaacatctgtcactggccaggtatggccagggttctggacggtggagaataaaatttgtagactggcattttagaagagagaaggcagaaaagtcagtaaataagcatggtgtggactcatgaagccaaaaggaagatagggagtaagacagaaggaatgttaggtggggatgccactaaagcttccttaaggtggggggagtagagtgtggaagagccatgggagccatgtgggcagagtctggggaatgtgcagggttttgaggcaagctaaggatggagaggccctgtatgtagacacaggcagaaatgccttaggaagatgcctagcaggggaaggagaacaggggtttcagtggactacttagtctgggcatgaccaggacctgggcctaggctttcagggctgcagggaggggtgccaaggcaagtgagggtgagtgaggttggtactgatgcagaactctattagtacaactggggtccaccctggcatacatgatcaggcagggatctgctggacttggctgtagacagagaaactctgctttcctcttttaaatgtcaaatattcatataggccatggtttgaaaaaggatttggttgcttggaaacaggcatggaagtagggcacctgaagatttctgaagctaaaggtagctattaaatgcatggcattttctgtcagagttggctctctgggccttagtttattcatctgcaaaatggggatagcagtcatcttttgtgggtatgtgtgtatgtgatttgcatttctcctccttttagcccagaacccctcctttagagagaaatggaactcattcaacaagatggaggctgggagggaggcagcataaacatagtagagataaaccttgtgctctgagatccacagacctgagtatagagtcaccacaagctcgtctagaagcctctctgagccttggtcttccctgcatcgttctgagaggattaaatgagacatgggaaatggcaagatggcaaacaaagagcatatcataatccggcagacacactctgactttatatacttaggcctagtggagcccagtgtatctgtcagctactgccatagtgatgtggcacaacaaacagcccaccagagcatcttgcatgtccttgttcacatatgtgtggactcgccagcccgggacttagctgatctaggctgagcttatcactaggctgtggtgggataaggtctcccacacctcttatcctttgtgtcttggaccaggagcaagtccactttgactgcaaaggcgcttcccagtactctgacattctatgggccaaagcggataatgtagccaaggtcagatgcacattctatttctactaggaatccagagttgcatgcaagcagcctgagtgtatgagctcactgggtgtggtatgagtgttggggaccagctatggttccacgtcctctactccttccaggtgtccaagtgctgttgcacaccaggttgaaaggatgaagtggagtctggaaaaggtggggtctacaggattctgtttggctgggagcggggagcttctccaaggaaagtcttccctgagattttagtgttcctcttcttttagatgatacttaataaaactgttctctgagacaatcgtaagtgaaatagcttgtacaatacactttatttggggtgacaaggctatatatgaatcgtagagaggggaaaggagttttcatggtgaatggaaatcattggctagagtttaaagtactaggaatgcttcttttgtatggagaggcaccccagaaattccaggtacttcctgggtgggttcttatcaggaaagaggaagttgaaggttttccaagggctatacagtgtgtgtgtgtgtgtgtgtgtgtgtgtgtgtgtgtgtgtgtgtgtgtgtgtgtgtatgtgtgtattgggaaacctatctggacatggtagacttcgaccttaagtagcaggatttcccaccaactgggaacctggctgttaatttatccatcatagtagacagatgggaaagtaaatctacaaagtgtagacatcttgcctaagcaaaaagatgcctaggtgaaagatgtaagtagcatttctttcctttcagaatgatacttaaagattgatcttttttgtgtatgtatgtgtcattgaggtcttactaaattacaattcctagcagtccttatgtgttctataattccatgaatgtttatgtagccaatctcctgttcaggcttatgtgtaaaccatgtgcacagtctctgtagagcaacaaaagactatctctggtgattccggacaaccttgcatctcacagtgttctgggctgcagagaatatacaattcagcttcgtgtagatggcctgttagcacagtcagaatcctgccattaaaactttcacagtcaacactctccagatttacaccctcacctttcttttcttgataggctttagaaaggactaaatcacagttattgggtctcggataacacccaagcatcccacatcagtgtctctgtgttcagagacaagaacactgacctgaagtgaggtgtggcctggtcatgatgctttcgagttcagccacgtttagctgccagatgagttggtgctaaacttactgagagccttctagtttttagaatgttgccattacctttttcagactttgtacagctcagactgggctcaaaccctcaacctcttgcctcaacctccagagtgctgggatcacctactcttgacttgcttcatggattttgagctgaagtgttggaaagaaactggggttttagtggttttgctattacttggtgatgccatccaggatgagacagggtgtttgtccctgcacctttagcataggccccatctccaggaagagccctccattactgttagcccatagccatgtggtttgaagataaagctagtctgttggctgctgcatctggactcacacatgaacctcagctagactatcagaaggcctcggaagggtgttcaggaagagcttgtgctggacatcccacagggctacttggtcatctgaagatgggcttctggtgccctctgtatgtcttgtcaggatttccaaaacacaggggatgttgggggctcttctggagttagaagggcccaggctagatctccattttcttccagaggctctgggtccctatccctaatgtgaaattgtggtcccagagagtcagagtagggttgagtccagtggaaaaggctataaattgggtatgcaggttggattctcagaagctctgggcgtggccctggcttgatagaacttccttactgtgggtctaagataatctgtcagtatgtgtacctaaggtctttctatgtgtttgtgcatacctgatggtgtgtgtgtgtgtgtgtgtgtgtgtgtgtgtgtgtgtgtgtgtgttagtagcatgtgtacctggtatgtctctgtgtgtcaaacctagcaaggggtattcatgtgtgagcacacctgcctgatggtgtgtgtgtgtgtgtgtgtgtgtgtgtgtgttagtagcatgtttacctggtatgtctttgtgtgtcaaacctagcaaggggtattcatgtgtgagcacacctgcctggtggtgtgtgtgtgtgtgtgtgtgtgtgtgtgtgtgtgtgttagtagcatgtgtacctggtatgtctctgtgtgtcatatctagcgaggggtattcatgtgtgagtgagcacacctgcctggtggtgtgtgtgtgtgtgtgtgtgtgtgtgtgtgtgtgtgtgttagtagcatgtgtacctggtatgtctctgtgtgtcatatctagcgaggggtattcatgtgtgagcgagcacacctgcctggtgggtgggtgttgtgcttttctttttttcctagagaagatccataggcttactgaggttttctagagggttttggcccaggaagaagagaaacatttctaaactctcaactaggagaggcacaccttggtggatcttgatggagggctctttggcatctcaccttccaggtccttgcagagaaagtgccttgtttctcaccctcaaagaactgctagaatctacttgctagagtcaactctgaggaccctcagccatgaggccatcctctggcggaccctgagctttgacatcaaacaaggcctttcgcctttccttccccttatgaaggtacccatcccactctttaattggacttcactcccttgtggaattgctaatgtgagtctggcagatgtgtccttcaggacaccactgagccatcagagctgccctacaaggacacaagtagtgtcctattgtgaagatgctagaagcttgttccaggccctcagcctggtgatgggatcggagcataactgaggcagcagtggatcccatagctaggacttgtctttggtctccagtcctccccactcatgggagtgccaagtcagcaggctgggcatttcaaagtgcaaagggtctagaggatggccactagaaagggcaaagagtctagaggatggccactagagtctggacttctttaccccttgaggttaggggccacagggagaaaaacagaacacaaatcagggttggaaaagtcagaagttaaaatcatatctccactacctactgactgtaggccttggggcaaatgccgcctatgcctcgtttgcccatttccaagataaagctgaaagatataatgccttccatggtgctttataagcctgggaggtaggaacatgttcttctcagccctatcatgggcattagggacttcaagaaagaaacgctatgctatcattagagggaggaacatgtgcccactgtctcctggtgtttgcaatgtacttgcagttgaaattttgtctcttgggatcatgaacaaggccatgactaatatgtctctttaaacactcatcagagagggctgtgtacgcatcatggtggagccttctattgtgctgttggctttttatgatctgaaacaattactgcagaagtccttaaactggatgcttgtcaaagaggaagagtaaggatggtaggcccagccttgtagctgtatgaagagcccatgtctgctttctctgggctgcactgggcaagagcagtagttgtgtcactgtgggccctgcactgcatctgaagaggctccacatcctttctcatctctgagcctggatgggctgagtttgttctgagcatatctgctcccagctcaaataatcctattgatcttgtttgactggagcctccagagtgtgtttggtgagaatgctgaggaagaagccaagcctgatataaactcaggcacgtgtgcattcgtgcttgtgtgtgtgtgtgtgtgtgtgtgtgtgtgtgtgtgtgtgcatatgtgtgcatgcttgtgggtgcgtgtgacatgtacagccttcacagggagtcagggcaatgctgaccgtgtatgtgcatatgtgtgcatgcttgtgggtgcgtgtgacctgtacagccttcacagggaatcagggcaatgctgactgtcatgtacttttactttctaccttttgcagtaaaggatcttactgaacccagaaatcaccagtttgctagactggtgggctatgctgggatccacctgttgtctcctcactgctagtgccagggtgctggggatcatgggtcttcatgcttacattggtggcaggctcttctttcactgagccaccttcccggtgccttgtttcttcacagcagggaagtcacggtgtaagtgcagaccagacatgtgtttactgcttacttagatttgattgacaggacctcaatctcatgctcagagctggacaggatccagagatctcgggcaacagaggtcagacagagtctgtgttcatgtcagcccttctgtaacttagggaattggcctttgagtaatgtctcagttcacgtgcatccatcgaaggctcaaaaagtagagagagccaggctgcaaacacacagcacatcatggtctgtgaggatggttgggcacaggcactcagccagttgccatggatagccacatagccccagagaaggtttgacagcatgtccactctggcttctctgagaagccttaaaaatgcctccaagaatccccctttccctcctccaaagccacaggtattctttatgatagtcagagtgcgacagagaggagtaaacagggccaggggccccagcaccatcaagttggagcagtttgtctctttctctcttggagagaacccagaggctgatctgcatggattgaaggctctggatacacgtggtgagacagagtgagtatgctggaaggctacgtggcaggaaacctcttcaagggcagcagcaggggatgtgtttatagagacattgcctctcagcccagtggatctgcttgaagcatcatactgcatacctcagtccacttcccagggtaagatgcagccccatgttcccctatggttccttatgactgaatctgttcatgtgaactggaagtcctgaaactctgttcccgatgggcaaccatttctccattttcatcatcggccatgctgctgtccagatgccaggctactttttaagtgcaaggctcaagagaatttgatttagaaagtataacatagcaggcagctgcctattgttttggcctggtctgcctggcccctcagccagctttcatcacctttttaggcctgatttggggtatcgcctcttccaggaagccttccatgatgcaccattgcactgtgctacatgcagtgtccctggctgcccatccctgctgctctctgtcctaacacttccaccacgggacagagtttttgtctgtctgtctttgtaagtggtgtgtggggtgctttagaaaagatggacagctttgctgatagcagcaaacctattatgtgttgcatgccagctggagtggctggctctaaacaaacagagtcttcacaggcagttgccttcatcttatgtcatgaaatgacttcataaactagtgaaggtcatgaggctaataaaaatatcagctctagtaagaatgtgcgattgggattgccccaggtagccgcagccccagattgtactcataatcactgttctgaccccgtgggccacctgctgttgtcctcaaggccagtacaaagcttggtacctagcagatgctcactcagcaagtgtgggcaggctgcagtagatgagattgcctgcaggacactgtcaggggagtctgtcttcctgctcctgtagacggagagtattgagctccccatcaacctcccccttcctccccaagccaagagagaggtgctctgctgccagacttctcttgtactgggagctgcatccaggctttgctctggggcacagggagacaagaggtcactgttggttacaatagttctgtttgggcctgagaatggggaacataagatcttccgaggggagagtgcttccttcacatatcctcaggggagaaacacggaggcatggttcatgctcatgtggcagatgatgcaggccctggcattacacaggttctcagctagctctctggccacaggtaggctctttggcctagtccccagagaacccttgtgctagccctgtgactgtggctggctctgcaccccccattcactcccagacaggggctcttcttcctgaagcttagacagtctttttattttgagaccttctaaacatgatattttgatgatccttcagttctctgtgaaggtggaggaagagatgtgccatccttagggtgctgagcaggtgcttgacaaagtaatactttgcttctctgttaccaaagttggacagaggaaggaaatctggaaaacataaaaaagtcataaagaaaataagaagctatcagctcacagaaccatcttgttaatgtttgattgtttcctggctttatttctagactgtgactgtgctcatacatatgttgttggaatcatacataggtctatcatgggttgtaatagttaccatgtccagctctcctctgtgctctgtaagcttttatgtgccagctatgcctcttgtcttctcggcacttctgacaccaggctaatccccaccccatcatctactaacaccaggctaagtctccaccccatcgtctctcttgttcttttgttgagacagggtctctacgtccaaagctggcttcaaaattgagatcctcctgcctttgcctccggagttctgagcatctacaggtgccaccatatccagcttgtcatctcttttatttttaaaaacttctgcattaaaatataattgattgataaataaaaagtatatatatatatatatatatatatatatatatattcaaagatacatcatgacttaattaaatataaataacttaatacattcctcaccacctggatttagtatgtattgggggaatgaagacacttctcttaccaagtttctagaagacgacaggcattagttatagcattgccacaggggggtcccagaactttcctatcttgtggtttccacaagagctccctcacctcaccccagcatggcagactcttggtgtgctctgcttgcatgttgtcacaaatggtaagacctcttttgtgtgcgtgttcacaggcatgcctctgtgtgtgtgcatgctggaggctagaaagtaatctgggatgtcattcctcagcagctgttcaccttgatttgtaagacagtgtcttctattgctgtgagaagacaccatgaacaagggaatttataaaggaaggtgtttgggggcttactgtttcagagggttagtgtatgatcaccatagtgaggaacaagagggcaagcatggtgcgggaagctgagagctgacatctgaacacaggcaagaggtagaaagaaagggagactgggtctcatatgggcttttataacctcaaaacccactcccaatgatacacctcctctaacaaagccacacctcctccaacaaggccatacctacaaggttacacctccttgtccttcccaaataattccaaacagttccactcactagggaacaagcattcagacacatgagactgttggggccattctaattcaagtcaccacacacagtatctctcagtgacttagaacttggcaagaatgtcagcctgctattgtcaccaccctcaagcagattctatagatgtactccaccataccccacttttttgtttttgtttttgttttttgttttttgttttttgttttggtactttgagtctttctgtacatccttcaagccatggattcacaaggaataggcttctgcagattaggatcctcttagagagcatcccctggctggagcagccagcctttctgctaaacaacacgccttgctctttgtcccttgctcacccttagtaagttttcttcacctggtaatttttcatggagtgtttaatacacacactgtatattggtcttgccctgagttgttcacattggtgctagcagcacgcggggtgacgttgtatacttccagctttgccatggtaatatctacaggatgttcctttctgcctggtgcccatttccctgatgtctgtgtacttcccatccttcttgttatacttgagtgtatatgatagagcatattttctaaaagacctagagagtctacatcagatgccttccccctccctgtgtccatcattttgtacatctgtaagatggcacttgtcgctgacagtgacgccttgcccttctacatgggttctgggcttgagttaaggtctgtttacttaagaagcaagtactttactgactgagtcatctcttcagccttttgtttttcccctgtgcagtcaaccattggccttgagctcaagtcaccatgcctcaacacagacattcaacactacccctagacctttgttctaagccaaacacccctcagctgatttcctgcattcatattcctcacctagctggagacaccatgtccctcccctccagttctttcccagttgaattcatcagggttctttgcacctttttgggcaggccaactaattttctgaggccaggggtgaagtctggcttaattctttctggatccctagtgcctatctataagggggatagaaatagccatttggctgtctctgagctagtaatacctgattgctaccagggaaagagacctgatgtgaatcgggtctaaaaggtagggagggcacatgactgaaacacagtgttttcaaatctggtcccctccaaaggtgagccaacaagccagcaggaagaccactctttgggaaccattggccaagacattctgatgtgacattcagatggtgctgagtgtctatttagagtatagtgtgtagaactgggcactgcacttctccctctgagagactgtgctggccccttctacttcccaggcctcctctgtacctctgtcacagacctgtgggatggtgctggcagtcctcagtaaataactaacatgtctccatctcttcctcttcttgtctctctcgcttacataacccagtgaactggaaagtcatttgtcctgagctaagttgtttatcttctgcagcatttgacggtgataatatcactccatcagtgtggtcctatggtaatttgggcattttgttctagcaccaaggacattacagttaataacacatgaagccatttcattaaaaggaaagttgagcgaggatacattaacataggctgtgaaccaaaacacaaatcatcttactcattgcctattaaggaaataaaatgtattaggaacctcaagccgttttgaagagtgtctaatgccatctgattgttttgcatgtgagagccctcacatcagtgtcagctgtctctgctttcctctgcatgaatatggtgtggctcccggccgttcctacatcaggagctctgagcttggtctcctctgccctttgtatcatgtaatggtgcttacaagtcttacttgtttgttccttggcttcactttaaaacaaagaaaatcactgagctttagagaacttcttatgcaatatgtctggagccatatgccattgtccacgagttccaggaagtgagagtcagacttgcattttctaagagaaacaagacctatgtttctctggacctgtttttcgtgctctgggcttggtagtgtagacctgtcatcccatatacttgggggtgggggtgaggaggagctgaggcaggaaaatcacaagttcaaggccagcctgaactacagaatgagatctctgaaaataagaaatgaaagtaatggctggggtgtgccacattggttgccacttgcttagcatggctgaggccccaagctaaatccccagaaccaaggagaggaaagaacaacaccgtacagggctaacatttgcttctggggtcaggacttcatgtggggcagaagctgagtaacaagggaggtgtttagtggctgctagcaagcagaggcagcatggtggtttgcttgcaaacccactgtttatatttgtgaattcttgttgcatgtgggccagactctatagtctattccttgtcagggtttacagcagccattaagttatccctaagaggtccccttcctgaaatagctctctggtttgggagtctgggtgtgttggtgacagggttgtataaatgccttgttggcctgcagccagcacagagggtaccccgctcaggctgagtcagagcccagtgtgcatcctgggtttattttagtgcttgcaaacccacccaggggggtcaggttctgacctctggtgttaccaatgagctttctgcaagcagagggcacctagtattgccctatccacagcaacgctttctgtttgtattctcttgtatgcctagcatttgacaattaattaggcatggtaattacctgctttaatttcgtgattgcacatcctataattacccctaattctgtaatagggaagttcatgtacacaaaggcagtggatgacggaggtgacagggcttgccatatctgcagctgccattgctcactgtgcctgttaggcatggcatctcaggatcacccagtgaggccaggctccaccccattctgcaggggaaggaactgagtttcagggcgagggaccatgctttgtgttaaagtaagtatactggggagcagctaggatggcccaggcctttcctgtgtatagctttgtgctccgtgtctctgccaacctgcctgatgtccctcatactttgggctaatgagtcctgtgttgtgcttggcaggcatttgacctggaacttctacctgccaaaatgagcttgcagatcttaaatctctttccctgcctatcctgccctcatccactgtgtgtatgaccagttgttcactgaaaggaacaactgacacttgacggatgtgttgatacaggtactggatgacaccattctaaatcctgaagtcactcagctctccccacatcagcatcaccctcatttaccaaacagaagtgacttcacttaaaagaggtggaagtggggttcagacccagtgtttagcatccctctcagggctgatccagccgcacctgtatgtgagtgggcatagcccaaccactgcccacagtttgagttggacatctaggtcctcgacaggagaaaggcacgacttgctcaaatacacatcgtgcagaccctgtcttcctattgatttctgcccacatctgttgcgtgtcaccactgctctctggtggagatgcaggacacttagcaccatcctttgtgctcaggtgggcagccttgctaagggtacctagctcatgacaatagtgaccacaattttttcataatagcatagttttgcctcccacatttagatctgtgtaccccaaggatcacgtacaagtgcatccaactcatccctacagagcaggtgaatactggtgacatgttaccactgtgggatattatacatccatgccaaagcactattgagagggcatgtagcagcatggatgcatctcacatacattatctgagaagggccagacatggtgggttatataagcatgaccccacttatatgaagttcaagaaagaagagaagaaatacaggggcacgcacagctctgcagatgagtggcactgacaagtgagaagtgtgagggagcccatggcattctgcaggcattcttggttttagaattagcatgtcttcactgcacagaatgataagcttcgctctggcctttaatatatatgcggtggcagatccttgatagcatttatttgtgtcaccctatgttgtccttcctcctagtgtccatctaggtccctactcttcataaatggcccctcttctagttccatgtctgatgtgtgcatctgtgtatgtgtgcctgtgcgtgcatgtgtgtgtgtgtgtgtgtgtgtgtgtgtgtgtatacatgtgcgtggcacatgtgagtatgtttaaagttagatgcccatgtgaaagaaaacacacagcatttttctgagtctgacttatttcatttaacacgatctccagttctattcatatttccacaaatgacatgattttattccttacagctaaacaaaactgagtttttatagtgatgatttcattatccattcaaatgttaatgggttcttgaagttggtagtgtcttggtaaaccagagtacatatataattatgttggtagtgtgctggctttggatccttttggtgtgtcctcagctgggtcatacatagttctacctgagcttctgaggggtctgcatcctgctttgcatagtggctgtaacagtttcttatcagtagaaatgagcaaagctattccgggtcccgtcttagactgtgttgtttgttcactagacgagccccagatcctcttatttcctcgaggcccagtccatgaaagcacatgttctagtctgtgctcaccaaaggactgaggcccacacctcacgccctcaatttactgttgcctccttgttctgtataggcctttctgggggtcggggggggggggagtgatggacttctgcagtgaagggctcttaagtctgtactttcctttcaggcagtggtcctgatgctggccccagctatcttatttctttctgctgaaccgagatgagtgactttatccatcgtttagaagggaacttggttgtgtagaagagactggtttttcattccaccaaggaatcattttctttgtggctcaagctaaggaaagttgagccagtcaaacttaatctgggtggaagagtccttgaaagtaattatttacacaattaattaattaaacaaatgaatgaatgaataactcttaacagttttcagcatgtacgctcagttctggggtatagaattcatgagggaatcatttgcacctcaggtctcccaggtttggttgccaagcaggctgttggtcatctggaggggtttggtgacatttgattctgtcagatcagatccttagatctgagcagaaaagtgtgaatgaggaggtcacatcaggggcttgttagcaagggcaaaacttggaagtcacatcaaatgctcaggaaaagggcaaagggaggtgcctctccctgccttctcactgctagtttgtggttccagaggcccctgtgagcccctgcccttgcaggggagtcctgggggaggaaacatgggacactggggagaaggcagctctggactcagattctccccccccaccccaccttttttcctgggcaactgatgttgcctatctgagtccatgtctctatctgaagatggtatgctcccagcttctgccttgcagcttagcctgaggacagaggagaggcttgtgactggggctgagtgctgaaggtcctgggattagctggagtgtgtcatttctgttcagccttgggcctcccacttgctgacttctcagaggcttatttcttttagagtgggagtcacagatctgagtgagtcatctacatctgtgtgaggtagtgaggtgagcctgtcatggatgatccatggagccttggcactttccctgctgtcctggctatcactggcctccagctatagtaactgtgggcacaaaaatgcactctggataccagcaaaggcaggagtgtgaacatgctgctcacagcaggagtcagctctgccctgctgctgttggctctcaagccccttgcccctgactgctgccagcctggtctggaaacgtgcaggcaaggtgtcaagacaatggcatcaagggtggtttgtgttgtctttactcttgagcgatcagtaactcaggagacagaggtcaggctttaggaatagggcctggcttcagagttaggcatgtgtttaaagaatataaggatgcctacccagcctgcagctcccgtctgaggtctgcactagatatgcagattgcagagctctgggtggaaacatagggcctatagaactgagtgtggcttcctgtaggggagcagggacagaagccaagcatccttgtagaaggctcaggaagagcaggggaacaagaagcacaccttgctcccactgagtaaaaagagttggcttctaaatgtacgttatgaagaatgcagattgtcacagtagagaggtttgtctaccctggtctgtaaggaggtcttggggatgcggggaccttgctatgtgaagtataatagtcattacacagaggctttgccctctctgtgactcttaggtggggtattttaaaacacatcagcttggagcagaggcagacagagcagtgggagctttctaagtttgaggctagcctggtctaatagcaaggttcaggccaatagcatgtgcttaaggagacctcccatttctcaggtttccttgccaagtagctgtgtcctggaaggtgctgaacccacaaacacagcagcatcttgtgcataccctgggcagggtcccagcttggctgagctaaagttatgtccctgcatgtgcttagactgcccggtgttgactttctgttccacctaccagacccttcggtggcctggaagatatcagcctcactcttttgccctaagtcagtttccttaatgtgcactggtcagtgtgaccccagacctgtggtacttacagaactggtgtccatggggcagcttgtcagggcaatgcatgtgtgacggggagctgcagctctgctgtcactcaggctgctgtggacacactgtgcagctgggctcgtgtgacatgtgcctcactgagtccctcctgtgcccactggtgccctcagtgcctgtcagtgcctagtggtgcgtgaagcagatgtgggccctgtgtggacagaatgatgcgccacctacctttatgagggtgacattaagagcttgggctcagcctgtcttcctctctccatcttcggcaggtctacattcggataaaagacgatgagtggaatgtgtatcggaggtacaccgagttccgggcgctgcaccaccagctacagagtgctttcccgcaagtgagggcctacagtttcccacccaaaaaggccatcggaaacaaggtatgcatccaggggccagttcattgctgtcatttttgtctgcccttgaagactgtgctcaccacaggaaaactgcagtgttagggaaaatcgagacgggagctacccatgagcctctgcctcagggaagggcactcttcctgtgggtgggctccccctattttgccagtgtagcttcctataaagcgccggagagctggtgtgcttagctcagtgtgggctgttcccttccagtaggaaacacttaattatcacccgtgttgtatgagtgcatcagagacaatttggatgtaggcaggcttgcctgtggcctgtagagaatattcttacaaacaggtcagtaaagactcaatgggtgaacatgtttgctgcatcagcttgtcacactgaactaatggtaaggtggaaggttttctggcttccacgtgtgcgtgtgcacacacaaaaatgtataatttacaaagtcaaaataagttttagcatccctgtaatcccagcaccagggagacagctcactggctaaccagactagcttattggctagttcctggtcagtgagagaccctgtctaaaaatcaaagtggaccaaaggttgtgctgtggtatctacacccacatgcacatgtgtgcacacaaagccacacacacacacacacacttacagaagcacatatatgcacttaaacacatttgccaaacatgtgcacacccccccaaatacagctgcacacacatgcacatatacacacacatacaaatgtgcatatatgtacatacaaacacagaataaattgacatattggttggccatgcctgctgactgctgttctgattcaatattttttccctagtttcagttactgctgttgttatactcattcacatgcatgaagagaccagactttatcagagaagtttcttttattgtggccacttctgtcatgaaggtgggatggcctctattgaaaatgtgttactgtttaatcagcatgtaaaaggccaggtgagactgaagaagacagagccaagtctggacccggggcagctgctcagtcacctgtcccagcagttggcctcatccctgtcctcctgttagtgagtggaaacatttgcctaccttgccttcactttgacatgctgagggagcttgaaaaccactgtgcccacagcccacccctggcttcctggtttaaatctcctgggcactaaagggtcactaactccctggatagttccacatcatagtcatcagaatcaggtgacaggatattaaacagccagttggacactgacgttcaggatcctttgaggacctgaaagcaactggggacaatattgacaggaacccctttctagggctggctctcagtgtgtgctgccaaccagaattgctgtattctcagctcttagtcctcataaagacagaagccacgttactttcacccttcatctatcacatcttcaggtctttccttcttgtgatgacagtgggccatgcagaaaacctgcagtggtatcccaactgaagattcctaagttaatgacatctgccaaggccattcaccacaaaagttctaggaactagctccgcctaccacacatcttacatcactaagagcattctctgaggctgaagcagccccttctccacccctgcttccacagcaacctcttccccattttataagccttcactgagttaagtctgccaagagtgccagtcccatgagccaacctcgtcaaccgaggctctgcactgaagaatgaggcttctcagttcagtcatttagaaagagcaggtggcaaccctaggtctgtcctgtgtgtagtggggactgggagtgggtttcctctttgcagtgggcctctccatgcaagagaagcctcccatctatagtggatcacccatggtccctccatgcagtggaagccccatccctgccacacccatttctgtagaatagactcttacttatttgtgcagaaatgaacttgaggctgaaggacaccaccttgcatagcttggctcacagtagaacagctgggtggcaaccagatagccagatcagtttcctatagacacatggacctgacagctgccagctccagcctcatccctgacatgcaccttgtcatcattcctcaatggctgaaggatggtgatcctggcctcacatgaggttaccctccagtccactttgagtgaagaccaggacagaattgggactgagtcagggtgtagaactgtcggtgcccataaggacctttgatgatctcaattaaaggccaagatgttgtggattcaggtgggcctagtacattatatctgctttagtgtcctgatggcaaaagttctagaaagcgtgaatacacattgtccagaaaattcactatgttgggaatttgactggtgtacttcaaaggtgactcacttgtctatggataatgagggagaatccatacatgacatctttggaatgacccagtcactgtgagctgactgtcatgggcactgtccagggaacagtctacacatatctgtgccatatgagcatctgtatacttcccccacagtgctgttagttgtaacagtgactggagcgtgagtagtgggtctcagtaggaactccccagttgagttctaacagcagaaaactgggtctatccacacgcagcacgtggaccttgagagggacgtctgaaagtgcagctggtggcttttccaaggacacttccttatagtgggcgtatcccagagtgtgggctgttgtgctaggtggtaggagcttacaatgagtaaaatggtgccaagaacccagaagtgatggagagatgtgttggggagaccaccaacatcggtagtggctagtgttccaaagagaaatcaagagtaaaaggagtcatgtccaaacaaagctagctctgcagccctacttgaggcctggcacttcatatactgagcaagggcagagaaaaacccagtcttctctcgcatcagtaaatggcaccaaagggacgtcagagtagattgcatcattttgccaggaaagtcatctcaggacagtgacacacataagcccagccttgaatggaggaaatggggttctcagggagacttctcaatatcaaaactaacacaaatcttacaatcatgtataaagaaatatgaagtgtggatgcccctgcaccccatgtctgctgcttgatgcacagggagaggttagactcaaggctgctctgtctgttgcatattctggcctctcttacctccaggaagccttatctgatctcatgggtttctttcccacactgtataccagctgcctgatttacagttctctctgtcctgtgacatcatggacaaccatggacaacagaggctgacttttgtgggcagagtgagtacagagaaggaacccatgacaagtcctgagttcaagcagattcatgcatggcagccatttttccatcagttttctttctctggttttatctttcatttgattgacaggtgcttgcatagatgcacagataacattgattggaagagacgattgagtcccaggtggcaccacctcactctggacactggaaagctaatgttactaggacagtcaatatcttcagcaggcatgatgctcacacctgcagtcccaatgtcttggaggctgagtctgcaggattctgagtttgatgtcagccttaggtacatagcaagttccaggccaactgggctatataaagagaccctgcctcacaacaccaaaccagttatgcctgatgtggcacttggggacagtcttcccaattagctggccacaactggctgtctccccacttcacccctgcctggctaagctggagagccttgtttttatgccaagcctgctgcttttctaattgacacttgactctctaccgggcatctgatctcatgcacattgtttttaggccgttagattgcttgtatatcatcatttaatctcttcctctagcttgaaaggccttcagaatctacttaacctgtgttccatctgccagttttgcatgtgtttttggacaactgattaaaatggcaccagagaagagcccttctaggctcttaatgtcttcttgagtaattgagaataattgccccttcccctccagtactcccactcatactgagggctggtatcacaatctttggcatatgtgtatttccagtgtctcagagccccagttagttatttttactggccccagctttctgggctgctcaattgctgtttttttttttcagaagccatgagatctaggcacaaagagtgaacactggctgtgtaaccttgggcaagtcaccgggcttctgtgtgaattggctgcttggcagcatcctgacacctcagactcttgtgggcatgcagtcagtgcaggttggctgttatatactgcacccagcatagctcagcatcctgcccccatgctagctttaaaacatgtccagagggaaccacactaatttggcttttgttgtggattgannnnnnnnnnnnnnnnnnnnnnnnnnnnnnnnnnnnnnnnnnnnnnnnnnnnnnnnnnnnnnnnnnnnnnnnnnnnnnnnnnnntgtttgagtactcagtccccagttggtgccgctgttctgaaaggttgtggaacctgtaagaagaggtgggttcctgggggcacagacagacactttcgagtctggctctgtctcctgctgccttgtcttccccttccctgtaggtgatcaccgtaaggagcacagccactgctgggcctgcctggtgtctctcgccctttcccttatctccttacctcacctcaatgaggagaggcttttattgtatttgttgaggcaggtctccctatgtgtagagcctggcctggccttactctgtccctgaagctgacctggagttgacctgaatgcttgagccttgcttgatcctgagtgtggggattccaggctctggtattgttttagattggggtacaagttccagcctaaaggtgctctttggagtatttccccacagtgaacacaccccagcacccctgcaagccaagacaggccccagcaccaggaacatcttcctgtcactctctccacagtgaaccaccatccatctaatgacagaccatctgaggcccgagagccttccatggagaaattctgaacttgaacactctcgctttttctctccacactacagctgccagattcttctctgctgctgcatgggatacctggcgattctacttcattgctgtatactattccactctgtaaagacaccacagttcaagtatctttcctgttcctagaagcgtaggtgatgctggctacatttaaccatctactgtctatctgctttctggggtctgcactcagagatgttattgctagccatatagtgtgtcaatcttcctttttcgtttttagcttttgaaatagagtgttcttctgtagcctaggctggacggagacttgtgatcttgtggcccatgcctggtcagcactgagttccttggtatggttccttgagagaatggaaaaagacagaactcatagaataggaaaaacacccatcttaccaccatctagaatcaacagccatgcacattttgtcctatctacttctaagttcctaaaaaaatactgtaaatttttctgttagtccctagagtacacagaaaactgtaatgaataagcacatatctccatccagatggaatgaatgttaatgtttagaaattaaacatcataagtacagctgaattctcattgcagcccccgccccagagaggagcagcatggggctgttggctcctttggccctgcctttgtacttgtatggtgggattataatgatgccgctctatgtatccttccccagctctcattcttcaggggtgttacaggactttgagatgaagccatttagacaacattccccctctttgagatactgcctcactgcgttgtgttttatgttgcccttgaacccatgatccctttacctcagcctcctagtttctgggattataggtatgcaccaccatgcttgcttggtcactatagcagaagtaccctgtgccaccacctcatgtctacttgggactcggtttgcctgggtaggcctggctaatgaggcacccgttgtactcttgtcaaactgaccctccaggtagcctggcgtgtccacatcatgtggtgagggggatcctgcctctcagcagcatgctttatttctgttttgccagcaatgggtcccgaggactgggtgacactagctgttgcattgtcccattctttgttttgtgagcctgtgttccttttcctgctggagaggacttcctcctggttccaccctttgccttcacgttgtttgctgagatatgacttgtgtcctcatggaagtagcaccttggacttctttattcctggaaactgggccttgcctcctcccagtgtgtgctctgtcattataaacacttatttacatctctgctttcctgcctaccagtcagtcagcccaattgaggtgtcccagctcttgcaataacttcccaggagcccatgtaccgctggagttgtttatgcctcatataagcagaggctagatttgtgctcctctgcatggaggaacagtaggccatgaattgtgctctctgtgtgtgcaagtccgtggaaacaagaggtcaactttgggtatcacggcttaggtactaagcacctgggttatttgagagagacaatagctttgggttattgtctctccgactaactggccagtgagtgctccagggatcaggctgtctccaccctgggatgataaaggtatgccaccatgccatgatgtttaactcaggtcctggggattgactcaggtccttatattcctgaggcatttctgcccacagccacagccatctctgcagaccccaaaccatgttctttagtgatcattctttatggaaataccttggtgaatatccacctactgtattagtcaggtttctttagagaaacagaacttcttttatatatatatatatatatatatatatatatatatatatatatatatatattcatttttattagatattttctttatatacatttcaaatgctatcccgaaagtcccctataccctccctctgccctgctcccctacccacccacccctgcttcttggccctggcattcccctgtactgaggcatataaagtttgcaataccaaggggcctctcttcccagtgatggccgactaggccatcttctgctacatatacagctagagatatgaactctgggggtactggttagttcatattgttgttccacctatagggttgcagaccccttcagctccttgggtgctctctctagcttctccattggggcccctgtgttccatcttatagatgactgtgagcatccacttccgtatttgccaggcactgccatagcctcatacgacacagctataacagggtcccttcagccaaatcttgctggcgtatgcaatagtgtctgggtttggtggctgattatgggatggatccccgggtggggtagtctctggatagtccatcctttcgtcttagctccaaagtttgtctctgtaactcctttcatgggtattttgttccctattctaaggaggaatgaagtatccacccattggccttcactcttcttgtttttattgtgttttgcaaattgtatcttgggtgttctatgtttctgggctaatatccacttatcagtgagtgcatatcaagtgacttcttttgtgattgggttacctcactcaggatgatatcctccagatacattcatttgtccaagaattccataaatccattgtttttaatagctgagtagtactccattgtgtaaatgtaccacattttctgtatgcattcttctgttgagggacatctgggctctttccagctcctggctattataaataaggctgctatgaacatagtggagcatgtgttcttattaccagttggaacttcttctgggtatatgcccaggagaggtattgctggatcttccggtagtattatgtccaattttctgaggaacctccagactgacttccagagtggttgtacaagcttgcaatcccaccagcagtggaggagtattcctctttctccacatcctcgccagcatctgctgtcacttgaatttttgatcttagtcattctgactggtgtgaggtggaatctcagggttgttttgatttgaatttccctgatgattaaggatgttgaacatttttttcaggagcttctcagccattcagtattcctcagttgagaattctttgtttagctctgaaccccatttttaatggtgttatttgaatttctggagtccagcttcttgagctctttgtataggactggtaaaaatccttttccaatctgttggtggcctttttgtcttattgacagtgtcttttgccatacagaaggtttacaattttatgaggtcccatttgtcaattcttgatcttatagcgcaagccattgctgttctgtttaggaatttttcccctgtgcccatagcttcgaggcttttccctactttctcctctattaatttcagtgtctctggtcttatatggaggtctttgatccacttagacttgagctttgtacaaggagataagaatggatcaattcacattcttctacatgataaccgccagttgtgccagcaccatttgttgaaaatgctgtcttttttccactggatggttttagctcccttgtcaaagatcaagtgaccatagctgtgtggattcatttctgggtcttcaattctattccattgatctacctgtctgtcactgtaccagtaccattcagttttttatcacaattgctctgtagtacagcttaatgtcaggcatggtgattccaccagaggttcttttattgttgagaatagtttttgctatcctagcttttttatttttccagatgaatttgcaaattgccctttctatttcagtgaagaattgagttggaattttgatggggattgcattgaatctgtagattgctttcggcaggatagccatttttactatgttaatcctgctgatccatgagcatgggagctctttccatcttctgagatcttcttcaatttctatcttcagagacttgaagttcttatcatatagatctttcacttccttagttagaatcacaccaaggtattttatattatttgtgactattgtgaagggtgaaacagaacttattgaatgcatgtgtgtgtgtacatatgtgtgtgtgtatccatctattcattattccaaacattatgttatacacgattgctacaatgttctgccaacatacaacaaacagttaaagaaatcctttcttttacatctctctggagaaagacgggtgggggtgggagtgcagatttttttagattggcttcagggtatgggccagctagtacaataatggatgcctaattattgtactaatacaataattattattgtattattatataatttattgtattaatgcgattattgtgcctaatagtggaaggtctaagaactcagtagttgctcagtccatgagtctggctgggtatctgagctgggcttctgtatacgctagcatcctgaagaagtggggtctaatgtcagtgacggaatggacttgccaacaagagtgagggcatgcaggtacagagcatgtccttctctatgtgttcatacaggctgccagcagaagtgtggccccgattaaaggtgtgtcttcctgcctccagacccagggtagaagtgggccttcccacctcaaatgatttacatgagaaaacattgctcacagtgtgcccagccatttgagttttagttgagccatcataccagcctgcaatcctccctaggaagggctgtgaaggctttgtgtcttgagtagcagaggcctttttctggagagctttgtctcccaggtcacagaagcattaggcttagtccccagaatattctcatcatttactttcctggggcttcgccttctgagggaaagcgaagttcttttttttataatgagttttgaagcttttttaagccaagtgcctgctcctcataaagccgctgaaaatggaactgttttgagtcacaaaggagcctttgatctggctcatggctttccccatgaaccaggcagtcttcttcctattagcaggaaataaacagaaccatgctcacattagcagggctgtcctactaaaaatggcagctctttgttgctacctttgcccgggcactacttacaaagctttgcccatgtgcatattctcatttaatcgtctcagcctcctggtgaccacaccttggaggataacatctgtcgccccttcagaccctgagtcctcaatccccttcttgcctcaggacctttgcttgcacagtttttgcattttgcccaactcttcccatagtgggtcttttgtctctcttaggttcagcttgagtcctctctgctcatagaactcacgtccttgagtatcgctcttctggctcctttttctttcagtagctttagtatgactccatgtttagtaatttgtttctataaatgtggatacccctgtgtcagggagaggcatcaaaaggataatataatcatataatcatgttaagtgtgtagtttagaggtgtcacttctaggtggagggtggagttcatgctagatggatgaggtcagtatgcagaagacacaggaaaacatgtcagagcaggctagtaagagcccttgaaggctggaaggggacttggaaggcagggagaacctggcagagctgagaaccctcaagaatgtcagactcacactgatgttggtctccatgtgaggcctagaccagtgctgcggacatagcaccagggcagaatttgtcagctggtgacccaaaggccacatttctcctgagatctgccttgtgtctcacagtaagggctgtgacagtgttgattattggaactacagtaacagttaagggaacagaacaacagcaggacttcctcttgcacttatattttctgtggcagccattggtcagtgccttgtacagtgggtccttccccgtcatggcatgagcctgtctgccctgatgctccacagactgcaccctgctgtaacagcttttaattttgttatcctggaggttcaaggctggcttcttggaaagaatggtttcttttttccatctaagttttgtttgcttatttaaagacagcatctcactatgcagccacaggaacacaattagaatttactggctgtgtaacagaatctgacttcaggaatagctggatctaaaagtccatggcagtctcttgggtactcactgacccctgcctactgtcttgatagttttcttgctctgcctatgttttcctaaattggctttcttgtcagtcagggtcctcctcaggcaaacatggtctgtcttcctggctcactttccatcagtgaagcatctcaagcagaaggagcgactgcttgtgtgggatagcttcatgctggggtcctgggccatgccgggctcagtcatgagagcagagattagctaagtcatgttccccaagcaatcctgcctagaccatggtcctgcaccctgctgtgtgtcagcttgtggaactaactacagaagagctatgctctcaaaggcttgggaaggtgtgtgtgcgtgtacgtgcgtgcgtgtgtgcgcgctcacacagagcacatcagtcctcacacagagatcttcagttatttctgaatgtaataaaggggctaagagccatgttggaagggtggcctaggtgatagtgaatgttgtctgaaatggcacagcatcaaattccttcaacacaaatataatatatacactcgtacacacacacactcacactcagttttgtttgttgacatccacagtggaattactcagccctccttgaaagacaaaagtgggtgtggaggtggcagggctatcagatgctagcagtgaagtgccacttggtcctgacctttagccacagggcatcgaaagtggctttgtgcactgtgtaatagctgagacctcacttgggacagacaggtcagtcttttgggaggctggacccacaaatgttaggtagcattctgtctgatccccacctttgctttttcttttttccctttctggctcctgcctgctccttagagtggagaaagagaacccagtttagagcacttcctggagattctcacggaaggcctcactcaggagcagcagtagactggggttcttggccctcttgctgggatcacagcaaatcctgccatcaacttggctttgcagtaccgatcgtacctcacatacttcgagtccagagacggtcaaccccaccagccacccctttccagtgggtggtgctgtgctctagagaacttgtaggtgtgctgctggtgagacagttcctgagctgggcaagcagtgggccatgtctttcccagactctcttgtgccacctctgaatcccgctgacattggcatctcggcagtgaggcagcggtgaggacagtgctcacctgcccagtggagacgtgagactctgcagtgaccatctggggctggtgcagagggtctgagctgaccaagagtcaggtgagggctgctgagctgggaggcagtgagcatgtcactgttatctgggatgctacagtggctgggagggctaatgtaagacctgcgcttgtcataggtgtcataccatgcagtggctcccctgtccatacttgtctttgttagccattttttggtcagtatggcactgatgaaatcaataactgaaggaggaatgttcatcagggcacctgagtcaatgagcctcagcccatgtgttcttggttccacgtttttggacagaacttatggtaggaaggtgtgtgaaggaggcttgcccatcatagcagactacagagcagacatgcaataagcagggtaagtaacctgtaatcccaaagacctgacccactaacctacttcctccagctggatcccacctctgaaagcttctacagcatccccaaacagctgggagccacgggcctgatacaagggcctgtgagggatatcttgcattccaatcaaagcagttactctctggatacagtgaactttacccaaggacttgtgtggtgacacctgacaacagttgtggctcctgggactcgttcatcactgtaagtcacaggcatttgccagatcccagagcagcttcagctactgtcttgtatccttaagtttatgagtttgcagttgctgtgaacatgagaccagccagtagaccttgcgattaatgaatcaacacaaaggcccttgtaagtgctgtcatagctccagggaatatgttcaataggaagggctttctgtttgttcctgcatagatgttccatgacttaaaaatcattgctctgatgggctctactatggccatgcagtaccctgactgtgtccccaccccagacctcagggtcactaaatggttaaaggtgggctaaaaaccccagattggtgttaaatatttctatgacacatgaacccataactggggtggtcaccatgagcagatcatggatgctccaacatctgggcctgacatgtgtgcccagcccattccaagagcaggtatgccttcttctaacagtgtgggctgaacacaggaagtgaaagctgtttaagggatcataatgttgcttcagcaacgtcatggtggggaagagtgagtgtagggcctgcaggaattagactgaaaagttatctgttgaactggaggctcttgggtctggggctggagcttggtggtagagggtttgcacagcatgcgaggacctgagtcagagccctgattttgcgataagaaagtgactactattaaataactaaataaatgtgtgtgtgtgtgtgggtgtgggtgtgtgtgtgtgagtcagtgttctattgctgtgaagagacacagtgaccacagcagctcgtataaagaaaagcatttaattggagctggcttacagttccagaggtttagtcctttatcagcactgcaggaaacatgtcggcacgcaggccgagaaggtgctggagaaggagctgagagtcttacatccatttccacgggcagcaggaagaggcctaacttgggcttctaaaacctcaaaccgacccccagtgacacacttcctctaactaggccacaactaatcctttcaaagagtgccactccctaagcatttgtaccaatggatctagggggcattcttattcaaaccctcatcatggcacatggtctagggggggcattcttattcaaaccatcatcatggcacatggagtgatgcagaaactctcaacaggatccaagagctgccatgcctgcttttatttatctaggtctcctcttatcttgaagaggtgtcttggactctctaagttcagtaaaaacaggggactctcaagtacttaagagaaagcaagtttaaggatatccaccatggtcctcagcaaccaaagcagggcctttaatcatgttttcctgtggctccattgttgtcccccaagggtttagcatgtgacaatttctgaaggggagtgggaagatacaagagatattgcacactggtttctgcctggggcagacagatcaccatatccaaattaccccagggcagaacaagcttccagaacctctgtgactctccttcctccagacaaggtgatagtgtttgaactggggcgtgtgattcactctgcatgaaccatggggccagttggtttatttctgttcttgtcagagctgtagatctctggtgtcagtacattggttcaaggcaggcagctgttgaagtcagacacatggccttcactattaatctcagctgtgtaacttggaggagacacttgatcccccagagtctcagtgtcttcctgtgcagtatgggaagctcgtgccttcataaagctgctgtaagggtgagttgagatgacgggtcgcctgttgagtagtgtcctacactcccatgcagttgggttcctagttcccgtcctggaacagtcatgctttccattctgtctgtctggttgattttcatggttaacacataccactgattcttttggagtactgctttgcatgtccaaactctttcctgactgttctgtccctgtgctgcccagccccagggctacaatctgtcatctctgaatctgagaaaaggagtgggtccagggtagagcatctttccagacactgagcctctggctttcccctcaaacggtgtatgaagatgatgttgggggttatggcattatctcagatcttccatttctttctatcccaagcagcatttgccagggctcatctatcagaacctaactagggtgctctctgcctgctcaccagtctccgtgtctgtgatgtgagaagctgtattccaggatacggagtggcaggctctaggtctggagtagaaccctgatctctctttggggaggattagaggacctcgttcaaacgccaactccataaaggcagctggaagaatgtgtgtgcttctgtctcgggcacctctgcctttcccctgtgatcacgatagggatgcccctctgtggaaaggattctgtcaaatctcagcctggctagtgctcagctcactgtctttagcagcatttgtttcccgtaagtaaatatttttgcacatatattcaagagatttttaatgagggttgccccattccaaagctggtctcaaaccccaaaattgtattctctagaggtggactctaggcaagatatataacattgacaccttatagtgccacctgtagaaataggccttctctctaggatccaggccctcaaagctggccctgctcatgaggcccaatcctgtcgccttgtgttggccataatctgcctgcctgtggctctggtctaatgtttgacatgctgggtggtttgggtttcatttgtgctcagaaggcagagatggctaggtaagatagtgctagtgttcacgggggtgggcaccggaatgggcacaggaggccaactcaggcttcagtaaggtttgtaaattctctggccagtgatctgttttacatctgctgactttgaagctgctgcctcttggcagggactggcctgtctgctgcagccactagactggacctgcggttctggggagattccaggttgtgcctggtaagagtgtgaggaaacacaggaagcacaatgacttttcctctgggaaggcgctgctgcagggtagagcttttcctgtaggagaagagccatgtcagaaactgcctggagatgggtggaacccaagcatgcattctgagcacagcctgtcttaacttccactctcatttacagtgatgcctaatttaatattttccatcctttctgaagcttgaagcaaaatggcccttttggaaggaataaatactcccattaaaacatccctatgtgccctgcatactcgtgaactgctccacccataactgatgttggtattcaaacagagacacctacaaaacagcagcagaccaatggacaacagtttcattaagtggccagcagaggtgtctggcaggttatgtgtggactcacacccagcccccccttctttcttttcctttcttttcttttcctttcttttcttttcttttcttttcttttcttttcttttcttttcttttcctttcctttcctttcctttcttttcttttctttctgtctttctttctttctttcaaataaaatttattttaaaatatacaactcagtattaacatttttaagtcatcaaaataatttataatagttaaatgccttttaaatgtacatgatatgttctgaagctaaaagtaatatgtactcaacccgtttttaaaatctgtttggaacattaaacacgatagaagtagaaaaaaaatctcttatgaagtcctctataaaagaaaattgtgataagttcctgataagacaaaaatcattccccctccaagggaaacactcagcgtaaccatggcttcatagaatgaattgggtagtgttccttctgtttctgttttgtggaacagtttgaagagtctttgtattaggacttagtatttgaaggtctgatagaattctacagtaaaaccatctggtcctgggctttttttggttgggagacctttaatgactgcttctattgctttaggggttatgggactgtttagattgttaatctgatcctgatttaactttggtacctggtatctgtctagaaaattgtccatttcatccacgttttccttgagtataggcttttgttgtaggatctgatgatgttttggatttcctcaggttctgttgttatgtctcccttttcttttctgattttgttaatttggatactgtctctgtgccgctctgcttagtctggctatgggtttatctatcttgttgattttctcaaaatcggtttggttgattgtttgaatagttctttttgtttctacttggttgatttcagccccgagtttgattatttcctgccgtctactcctcttgggtagttttgcttctttttgttctagagctctcagatgccctatcaagttgctagtgtaagctatctccagtttctttttggaggcacttagagctatgagttttcttcttaccactgctttcattgtgtcccataagtttgggtatgttgtaccttcattttcattaaattctaaaaagtctttaatctctttatttcttccttgaccaagttattattgagtagggcattgttcagcttccatgtgtatgtgagctttctgttgtttttgctgctattgaagaccagccttagtccatggtaatctgataggaggcatgggattatttcaatcttcttgtatctgttgaggcctgttttgtgacagattatatggtgtgttttggagagggtaccatgaggtgctgagaagaaggtatattcttttgttttaagatgaaatattctataaataccttttaaatccatttggtccataccttctgttagtttcactgtgtctctgtttaatttctgtttccatggtcttccattggtgagagtggggtattgaagtctcccactattactgtgtgatgtgcaatgtgtgctttgacctttagtagagtttcttttatgaatgtgggtgcccttgtattttcagtatggatgttcagaactgagagttcttcttggtagatttttcctttgatgagtatgaagtgttcttccttatctttttgataacttttgattgaaagttgcttttatccgatattcgaatggctactccagcttgtttcatgggaccatttgcttagaatattgtttcccagccctttactctgaggtagtgtctttctttgacactgtagtgcatttcctgtatgcagcaaaatgctggtcctgtttatgtttccaatctttattctatgtctttttattggggaattaaatctgttgatgttaagagatattaaggaatagtgattgttgcttcctgttatttttgttattagacatggaattatgtgtgtgtggctatcttcttttgggtttgttgaaagattacttttttgcttttctagggtgtagtttccctccttgtgttgttatttttccatctattattctttgtagggctgaatttgtggaaaaatattgtgtacatttggttttgtcatggaatatcttggtttctccattgatggtaattgagagttttgctgggtatagtagtctgggctggcatttatgttcttttagggtgtgtatgagatctgcccaggatcttctagctttcatagtctctggtgagaagtctggtgtaattctgataggcctgcctttatatgttacttgacctttttctcttactgcttttaatatcctttctttgtcttgtgcatttggtgttttgactgttatgtgacgggaggaatttcttttctggtccaatctatttggagttctgtaggtttcttgtatgttgatgagcatctctttctttaggttagggaagttttcttttataattttgttgaagatatttactatccttttaagttgggagtcttcactttcttctattcctgttatccttaggtttgatcttctcattgtgtcctggatttcctggatgttttgggttaggagctttttgctttttgcattttctttgagtgttgtgtcaatgttttctatggtatcttctgcccctgagattctctcttctatctcttgaattgtattggtgatacttacatctatgactcctgatctctttcctaggttttctatctccagggtggtctccctttgtgatttctttattgtttctatttccatttttagatcctggatgattttgtttaattgcttcacctgttttaatcttttctaacgctgctcagtccacacaagacagcctgtgggtcaaaccttgtctgtggattcctgacagcacgtatggtaaaaatggtggggactaacttcttcagaagggctgaccctgcctgtccacgttgccccgcaacctttgggagagcttctggctaaggtcctggattcacacctccattctcattgtgagagtagttactcatcacctcagcactgggattctaggctgaggcagaaggattacaagtttaaggccaacttagcacacaaaatgtgagcctgtctcaaaaacaaaatcagaaacactgaaagacgtcagaagcagcagactcctttgaaaatgtaggcttcaccatgacagatacactagttggtaatactagcacatgaatgttttctttgttggaggcataatgatatttgttacatagaaacatgtcctaattttctagaattatatacaaagtgtttaagaatgaagtatcaagtggctataattgttcattattttattgtcctatttttgatataaagtctcatgtagaacaggtatatctcaaacttgctgcatagctgaggctggtcttgaacccctgatccttctgctttcacctctcaaatgctgggattatagaaatgtaccaccatacccagctatgactatgttagcatgggctagggatgtagctcatagatagagcactttgctagcatgcttaaggccctggctttaatttctcagcaatgtatggtgaaaaggccaaaatgaggaagccactgtttcattagacgagagttactggggatacctgagacacttttgtaataaagcaaagacatcggtgtttacagagaggatggtatcttcccaagttgcaggtatgcacgctcccatgactgtgtgcacatggtgtatggatatgcaggctgggggccagagcaagagctcttagtagcagctaagggtctaggcagcccatgggtctaagtcaaaggtcagacagtctaccttgggactgaggagatgagcatccctgtgtccacacagaaaatggcttcggctaaaagtcaaggaggaaataagacttctgtgaactgaatgcaggggcctgaggattgtctcctgagctgaggggtctgcaattgcttcttgaagacctgagtccccgcttatctattgtctagtttagggccgtgggctacttcttcccatccaatcctgtcagcagccttggtggtcctgtaatgagacagcttgtgaggagcatgggcacagggaagacttgagacatactgttgctcaccctgaacagcttgggtttaaactgtttgtcccgacccagggagctagttcattctttaaagtaacatcagataaaagaaaaatcttagcacacttccttttaaaaataaatctgggtatgatgacacaagcttgtaaacccatcactagggcatcagagcaaggaggatccttgaggctccctggccagctagccagcctacttagtgagccataggtaaaatgctctgtctcaaaagcaaggcagacagtatgtctggagggatgacacccaagatatcctatagtcttctagtctccacatacatgtccacatacacacagtacacacacacacacacacacacaacacttgagagcaagcagttacacaatggttgccgctcagttggatttatttttaatcaagacagtgtggaatcccaggtactggctctcaagatgaatgggtgatctgaaagagttgggagttcctccaggtgaaacccccatctgctaagtcattgctgcctagaggacctgagtgaaagcagacattgctcaggtgatatctgatggatgtagagtgtcctctggcctccatttggggcacttaccctccttgggctctgtggctcagcaaagctacttgtgtaccacaaagggccatctgtgattcttgtggctatagtgtctctgtccatgcccagaatcctctgcagtcccttccaggactaatagttcctgtctcattttgctgccgggcctgtcaagcttgctttaggggtttctcatgcaaatttaaaacccaggcctgaggagggccattcaccctcacctgatccatcacccctctcaggaatgaacatctaattgcctgatgtggagagcaaggagcagagtcagcatctagacccagtgagcacaggtcaagggctggaagatcctatttgtcttgatcccaccaggctgtggaggtttaagcctggggcagtgctggctgtgcccatccagccctcagcactagagttgcacactggggcaactcatggagaagaagacgtcacctgctaatagattctccctggttcttcctcccatacagttcctcaaggagacttctcagagcacacacatggtactgaagtctcagaaaaaccacagtaatatatgtaacttaactaagtgtgcctggtactgcagagccttatttcagtggacttatgaaaataagccagtctctgtcaccaggcatcctgttcactcatgcttatcccaggctgtttgggagttctctgctggagagcgaagcactaggaggcttatttgtctaggtaccatccaatacagtgggcagagtattcctaagaccctggtgagatgagctccctctggctcagggggttactctgtggtccagtgcaagggtggagctctgctgtaggcaacactttccaccgttgctgtgtgatctaccagattgagactacaagtccctgcccctccacagctttctctccacaccaagccaccacttgcccagtaaggcctctgctggcatccatactgcccacatttctttgtcataatccaggacccacctgggcaagagtagaagtaggcagggaatttgagggggaggcatcagatcatcacagagttccaagcataggtgcaatggtgcagggtactgtctggaggagctaaccctgcctgcaatggccagaaagacacaagacagagtaagcccaagtaagggtgagcctccagtgcacacccaggtgtgactgtgacttggacactgtgcccacctgagggctgtgccatgcagctttagccacatgttgaaccttgtgtaatcagtgacaggttcatattttgaaaaactgaagataaactgagcatgtactgcagaggagtagcagtgtggttgataaccttatacgcctgtgtggttactacaggcatttatgctgtctttgtgacctccgttagagtcagtgcaatgatggcttgtatttactgctctggccctggtctctgatgccacacttggactattgtggcatctaagaaataacagccacacctggtgactcattcactcactcagccatttttggaatcatactctacacagatattgggccacctttccagtcatccttcccatagcacatgtgaagtcatgcagatggtttgtgcataggcgtgccccttggctgatgcctaccccaccttgggcatgatggaatagaacagagtcttgcacatagcaagccagcatgccactctctactgcagcccctctgccagtgtcacctgatgggtgcatgtgggacaagatcatctctgaacttaggaaacaagtttactgagtgtacaccttccacctgtgtccctaggatgccaagtttgtggaagagcggcgaaagcaactccagagctacctacgcagcgtcatgaacaaggtcatccagatggtgcctgagtttgctgccaaccccaagaaggagaccctggtgcagctggtgcccttctttgtgtgagtacctgccctggggcatgctcctggacactgcactctgccccctttgcacctttagagagttaggagccagagattctgtaggttccctggtgctgtggcgctatggggcttgggagctgtcggtggtgctgaaacgctaattccaccctggaccttaccaacctagtgtctgaatggacatccttgatggtcctccgttcaagactgagtttaattgtttttattacatgcttttacttgtgtgtgcatgtgtattgtgtgctacatctcatgtgtggaagaccgaggacaacttgcaggagttgtttttctccctccaccatgtaggtcctaggggttctactcaggtcaccaggcttgggagcatgtgcctttacccagtgaactggttgcagcactgggagatccaggccaagggaaaaatacctgtcttttttcactttctgagtgctcccaaaatgaaacattcagtgttgatatttgcaatgcatagttcatagactcaacaaagagttgtcttcctgacctggcatctgtgccctgaggtgatggcatcttcctcttcacttgtcccacaccacatgatgcttctgcttactggttccatgtacccacaactctggtgctgttgttaggaagatgtatctaggcagtgctttggagtggtgctctgtcccaaatgccttcattgtctggatcatttatgtccttgagttaagatggccaagatcatgaagtcctgttattctcatggtctccaggtgtgggaaggtaatgatactatttataatatactctccttgtggaagtcccaggtgtgaaaagcctcagaaaaatctccacaggtgggtttgagaatctcacttgagaagcccttgtctgagtctgtataatttccagggacaaaattagagtgtccttccactgaggctctttaaaacagtatgcagaaaggtacctgggctgttcaccacacagcgatgttctaaccagaaatgggtggatttctactctgtgggatgtgcccagagtttccaggttgaactttgaccagacagacagacaggcagagagctactctctgcaaagatccttttgttgtagctgagaaggtcactcactggttttgctactcttgaggttttgtgaagagacataagtctaatgcattgtgtattgaaagatgccgtttctcctatttaaaagagatgaattgggacaccacatttccccactatccagttattagtagtgccatgttacatcatgaagaacactagctcatctcttaggcagctccagcctgggtatctgttgggaattagcctttccctctgagccccagcagtttgggctttttaagggagttccagtccaggcccagaaggactgatgacagggaatctgagagaaggatggtccccaaggacacgatggttcccagctggctccagcagtccagtgccacagaccagcgttcattcctacatgctaggtcgctggattgtgacagctatatgtcagtgtgtccagcagggactgaaggtccagctgttagtgccagtcagtgctgagagagaaattgtctattcctgattagcacacagaacacagggtccaattttgtgggtttaaagaacaaaagaatttcagcagaaaatttggggaagtggaattttgagtaaacactaggctgtactctggtcaacccccaatagtcttatccctttggctttctttgaaattgcagtaattaagttccctctcctgtcttgtgagtaggtgagattgcaaggtgaaagctataggttgttcttattttggggtcagagaggtaatctgcagccaagtcttgtacatgttggcagggatccccaagatgttttctatctgtgttacacagacacactacacaggcatacacagacaggtgtgtgtgtgcgcgcgcgtatgtgcgtgtgcacaaatgcacagatacacagaagcaggcacatatgcacatagacacacataaatacacatgcatacacatatatgaacttgtcaactaaagaaataaatcccttaaagcatcatgttaacaaatctctacagcttgcaccttgtttttttttagacactgattcaggatcttaaaggtcccatctagtgagtgaatgtccacacatgtgattcctaagagtgttgaggtgatctgggccagccccatgctcctgcctcatctcatcgtcctctaggctctcactgcgtggctgctgtgcttgttttactggtggagctgtgtgaaggttgccagtaaggattgtataccaatcctgcaaggatttgtagcagttcaagattatagcaatgcgattacatatgtgaactattttataacgtggaaaagcaaagcaaaggccagccagagaggagacatggctgatctcagggcccctcccagcctgtgggaagcctgggcgggatggtgccctcccctaggttggggatgtagctgagaaacttacagccccatggacagacccaatccttctgcttttgatatgagcggacagtggggttttcttgtctgtttttaagtgaagcagttgccattgtaaaacagctaaaaacatcaggttaagacattgaaataatgccaggcttctcttgaacataagattgatcttgacctgtccccaccatacgacactcagctttgggcactggtgactctgtactcctaggcctttgtctcttagatgctaacccagcttccctagcacacacatgattctctggctggtttcttacttgctcacagtcttacactcacagggcctgcttaactgcagagactcaaaggcatggccctggatcttgaccatccttctaggaaccctttcacataggtaatggacttgatataccctgtcccccacactgctgtcattcattctgcatctgcttataccatgtgcctgtcattctgttctgtgagccagacgtagtttacttcctgttccagtagcctgcgccacctggagatggggcagggatcagggccaatcagagtttctgagaggagctggctggtgaattccctcctgaatgtgcctataagttctcagagttctgcagtcttgggtctggtgttgcatgtagcctgcttccacatatactttgcagttgtcagtgttgttttgtgtttgggaggtcgagtgtgcccacttttggcctgtttcctcccttggcaacaaagcctgcagcacccaatgctgaggctgaaagtagggcaatgggaagagggcatttcttctcaaccttggcttctgtgccagtgtggcacacgggagtgctggagtccccacctccaggtagggagaagaaagatagcagctctcactgaccactcaggagccccacgttgtctgttctctcctggtgggtcccaagggatgtaacctgctgcagaggtttgctcagacccagggaaggtgaggcccttaaggaagggagcctgacttcacatcacatggcctcagtgatttgctaggctgccacttaccatattatcattaaaatgtttctttgcagtgtaactcatcccttggaagcgtccatgtccctgggagggacagatgggggagacagaataaagtaggtcacagcacagacccccacgtggaggttcagcagaagtgtgggccgtgtttctccacccactgttgcttttactccaaacattgttaaatatagtttctgatgagactagaagagccatgttctcccagagagcaattaagtttagtccagggtcgcagtgggctgctgtgtgctctgccagggcccacttgagcccacatggaggcttttttgcttcaaaaggtgttactgactcgtacagctcagaactttttatcttgagtcagtgtggtggatcgtcaagagccctctaggctccacagtcctcattacttcagagatgttcaggacatcactgatgcacaagctacatggccgcaagcagaaagggtttaaaaataagtgtaactgcactggcatttggggcgcgaaggatcatggcttgctttgctggactctgtccttctgtggactctaatcccagggagctcccccgccccacccagggcagggggcagtctctgtccttgcatctctatttagttaggaggcactgggcaacacttgttgtatgctggcctgtggcttacaaggaccgggtacaccagggaggcaggctggggctgaaagagacttagagggcgtgaggttaatggagccaagacatgattctgttcgaggctctccagtttactatgggagtctacttatacaaggggaaggtccatcccctgccagtccattcttggtgtctggagccagcctgtaggtgatgtgtagaataggatgttcctccagaatgtatcaggtgcttctcagcaggtagcagtgtcttggagagagcagtggcaggtggcagaacaaaagagccatctaggtcagaaggctcccccttagggtaatttccttctcagtggcagcaaggtcaaagtctggatcagcctgcttcagggctgagggaggctacaaaccctcgaggttgttagccttgcacccagccctcctgagctgttgtgtttcgaggctcatatccctctcccttcctcctctccattttcattcttccctgttgctcatcctgcctttgcaaatgctgagcgaaatggcaaacacaggaacatccttgcaaagacagtaaacactagtatgttaatctgcataggatgtatcacaggagctgtaagaaagcacactctagaagcatgaatctgtgtagttacagcctccctaggaggtaggcatggcacacactgctgtagcagtgctggtggtattggctggagtcctccctgcctaaggtattcactctaggctgttgctatgtcagtctaacccaagctagtattgcccgtttactgcactggtcactgtgagttgctataatagtgagtggaaaacatgaggatattctaagaacaggttcttgttggtgcaatcttcaagtctgatttttggaattgaaatcatgaagactcctctcacttagggatttggagcatccttcttcaggatgcaggttcccaggacactagtgagaacgactgacttgggagtcactgaggcggccaaagaaagagggaggaacaaaacacagcgatgaccagtgttgggccctgagacagggtagaatgtagcctggccaggcagaggggaagctgggaaggaactgtcagggttgaaggggatcagggttttccagagttcctcctttgtctgaacagcctgtgaagcacagcctcagagcatcaagagtagcaagctctctgctcctaggctgctaagttggcagaggccccacacagcaggtggtgtgcccacaattgtggtggcatccctgccaccccatcagtgtagcagtgtactgagttagccatcagggtcaacataggggaagcaggaaagtgtggaggggttgcttgggccagcgtgcttttgggcgtggcctttctcaacgggcagctgtgggaagccctcattctgcagtgaacagtgtatagagaaacaggaccctgtgactatggtgccgtgttgccatgttgacatggtctgagcaggctcgttggatcttgtaaagctatctgcagacctgtgggctccatagacaggagtgagacaggtgttgaaaacaatgtgttcttcaccctgtcggatgccctgagctaggccggggcttcctcccattgggtcactggaacccacttgctcccttggtgtttgtgttgctgttacttccccaggtgagaaaatgagcgtgaggatgaagtaaggcagtgcgctgctgggtgtgggactggggtcacaaggggagggacgagccacagagcttttctgcctctcctactagttcaccagtgccatccatgttcagggttgctattcggggtccttttgcccaagtcagaataaagcctggtggggggcatgcggctgttctctgtttcctggggaagtcccctgggtacaatctgtgcctgctgcagcccctccaaatgatgaccacagacagctgtctggcactgccctagatcctaccacagcctgcacttcaagtagtgcaggtttcagaaagaaaggtttggaaaatgatgctgaggaagatgcagtgaggaacttgggtctggcattactgtagagcatggtctcagatgtctgctccacactgtgcctgacctgttgttcctagctggcttgcttgggagccatagccctttcatgtcccttgtgtgtccaatatgcccattgtatgctaaatggccctagaacatcgagacccataatctgccagcccagcagtggagctcgggagcagtggtagaccactgcctgggaggtgtggactcaggagtggtggaggactcgggagccgtggtaggccactgcctgggaaaggagcagagctgcttgggttcctcttgttcatactcgggaacttgctgcgacagggctgcagatgtttttcactgacttgttctgggaaggcaggttgagaacctacaaatacaacaggaagctgccatcctgttgccacttagagccatttggcactttttcctttcaagggctcagtagtggcatctgtggagatggagggctctgggctgggtgtggcctgaggctgtatcctactcactaactgtggacttgcccctccacaggctttgtgcctccattcccccttctgcagacagtgttggaggtggcatgctgaggctgagctgtgcaggaaccacagagctacaatcgttacagctgctggcatcgctcgtggggatgtgcacagaattcctgagctccataggaacagggcagagagtgtgtggcattgtgagatgtcaggggcacagcaagcatgttcactacagactgcagtgggggagctctgtccacattgcagccatgtgaatgcagaaagagcaagacttggtcacacagacctgcagtcagtgttagaccttcatagcctgtggcctggctcactctctgcctcagtgtccttacctgtaaaacagggctgagtcacaaagaccccagaggcttaagagtattaaaagaaatgctaccaagtatgtgcctttgcagggtgccgttctgactgcagttacagcctagctcgtgttcagagtctcactttagtccccaaaggatatggcttagcagcatagatattactacaattgcctgccctacttcgtggcttttatttttaaacattggagcctcagaacatccagtttggagaaagggaaacagattaggttatttttggcacagtaccctccatccaatttagggttagtgggaaaaaaaaagaagaagaagaagtaccaaccccctgtaatagtggaggtgtggtggcagcacatgggcaccaggcgctgaggtgactcgtttcaccgtggtgccacctcatcctggtgagagcttttctgtctgtgggtcaggtagtcacacagccttcacttccaactttaaaatgtgctgtctagggtgaccatgagtggttatctcactgggctatcaatgagatacctactcctaccttgttactgctgtgcagaaaacatcagtcctaggtcttggcggccccaagtccaagcactcctcccacttcagatggtaggctaggaggctctggaattgactggtctcttgatggggccccagtgactccttgcatcacatctagggcaaagggggaggggtcagtcagtccttacagattcacagttgagcaggggtgatgtgggaggaaggggccagtatgccatgcactggggctagggttcctttctcacaggttgtgtgagaaacttgggacacnnnnnnnnnnnnnnnnnnnnctgcattctgtacctgctgagcttcctggcatatatggaatgcccacacagcctgtcttgccatccttggcagagtcaccgaccccatcagagtaagacgtgtcttaaagttccctggagaggccttcagatatacctccagcctgagtggcacagtaagagacaagctctgactgcagctggtgagctaagtcagctagttgtccaggccgttcctcctgcagaactctctctctaagcccaggaagtaaagaagctgatggtggccatcagttctgatggtgtgtcctgatactcggctggaaagagctggcaagggagagtaatggaaccttctggtcacctatagtaagttgcttttcctggactcttaactcttaaccaagaggccaagtttcacaccaggtccttgattgaacattcatatggaaatggtgtcatagaaatggtcttgagacagtcattggttctttggacttcagccagccatgaggtgtatttcactcaccatctggtaactggggattatccatagtggctcacttcctccagtcacccctcagctcaggtgggaaaatgggaaacctgttggggactgagtacgtagccagacagctgcagcctggatgtaagactccacagctcaggtcctggccctggggggctccttccctgccccccccccagaatgaaatggcagtcaggccatggagtgtgtcagatgggaaggagtcagccacagttcatataggggcagccttagaatgatgacctctgactcatccatatggactgtggttaggtccctagccaggtctctggtttccagacaatccatggctgctggaccactgcagtgagaaagggaaccttctctggcacaagtcacttctggaccccaggaacagtctgggatagttactgtctggcagtgaagggctggtgtggacctctttcaggactctgatctttggggtcagccccttcagtctcagtgcataggatgggaaacagtgaagccatggtgggctcaagtgctccatctgtctgtgccatactctcgcaatcctcacgtgtgcccacaacatggagatgctaacaggactgtatgggactgcagcattggtgctatgcctgtggaaggcacatagtaggtgctctagtcatgcaatccatgtttccttttaatcccatgaaggatacagtgaggggaaatatgaatgctagattgatcgattggtaattataaacaattaccacgaacaagaggggaaatctttattttccattacccacaggtctgctgtgattcaaactgttgttttgactaaaaaatgaacaaaacatgatgagaaaattagaggtgtttaagcatctaccttccttgcttaaaaaaaaaaaaaggaaaacttcacacatgtgcatttatagaatcaaatggttcaaattagtcccagtactgaaaggaagaccaggctcatttaacttgcctaggatctgtcaatgtagtagcccaggctggccaggagcgcagctcagaatcgcagctgccttccaccaaatgcagggtgcacgcctgatacacaccaagcatgctggcagtgctaaggtgagtcatgctcccacctatgacagtgacacagacattgagcccagggaggggggccatgcacaccagctgcggattgcttcagagacaagtggaaacaggtctggtatggatgtgtcactgtggttagagaagccctcaagggtaatgggacatggtctatatccctcagaggcagatccaggcagagtaaaccatgggtgcaaaggccctgtgagcagaagggccagtgcgaggaaagcttgtagtgtagggaatggatgggagacactgggggaggagtttgatcatcaaggctgaagcaagatgactctggggaggtgagaagggtggatgcaactgttagcccctggtgtgtttagaacacagtactgaaggtctggcatggctgagagagtgcatggctacattgctggtgtgagggttgccatttagtaaatggtgactcggagatgcaggagatgggctttgtgaggcatttggacatccgtgccgagcaggtagtgcatctagaacccgagggcagaggcctgcacaaggtgtaaactgaagagctgtccatgtgcaggcacctggtactctgggttaagtaaggtcattgaggacagagtagcttagaggagaggacttgtggctgtgcctgggagatgtcagtaggtgaagaggagcccatgaaggaggtgtgtggcgcacactctcaagtcataggtcctagaagccgagggacacagcccagcaggaaagatgcagtcttcctggaattttccagactagagcatcccctgcctccctgctggcgagaatggaagttgctaccggggaagcaggcagcccaggcacacacctgcctctgatgcgagagtggggtctgaatggcacctcttctgcctgcccagcaaggcagcccagagtgtctggataccggaagcgcggcatatgagacgggctggtgcaggcagcagctctctcatcctctgtcacttctgtccactgtcttcagcctaagcagatccccattttgatttttagggctgaacccttggcctgtgaagccagtggcaacatcagtgcaattaggtgttgccacaaatggaagtcttccctgggccattttctgcctttataactcaagatctcagaggcctcatcctaagaatagccaactgtgggtaggggacatagacgacaaggcctggcagagtttgcactgtgctcaaggagcagctgctgctaagatggccctgagtgctgggcaggagagggccaatggggcgcaggagttggggcatttctaaaggaagggcctagctgctctgacactcatgtgccctctctgagctctggttcctctcccctggacctcagacctcttcagcactgtcagtggatctgcccagggatgagccgaagagcagcatctttgttggatgcctgactgacaggcaagctgaggtgacaatgtctgtaggtcagctggactacttaggtacccagaggttacctaagatacaaatgaaggccactgtgttaggtgccactgcagtgacctccaagcctgccggttgaggaaatggcagcatgccctgaagatgtacaggtagagcagggaggctttgagaccaggtacctgttgcttatagacatctgtggtagtgctactagttctcctttcaaatggcctgctgagacttcagaaaacccctgagcctcctctgctctcaatgtcataaagtaggggaaccaagctctggggctagatgcagtcccacctgccctgtgtgagtcctttgcatggggccttgcatgtagggtttcatcctgtactacagaccccatagataggagatggtgacagaaagcccctgtcccagaccagtgaagaacagagaatctgtgcctgggttcccaggtttgtgcctttcagagtaagagccactgcagccatttgcccccgaaacacacacacacacacacacacacacacacacacacacacaattacatttaaggcatgatggatggtccttgctttgtttgccctgtttttagagctgtggaatgtgagccaggccacaggcatattgctaatttggtgtttgcttatttgtttgtttttgctgcttgtggtggtctggttccttggtttttacggtgctggaaatgggcattgcacacatgtccttgtgctacatcactgaatgcattggtggatcgggtaaggtactgatccatttctgttctgattcataaccagagcccctgctctaagagtttgaagatgtgaggcctggccactcacttcaaaggaggaagaagaaagtaatgagcaaaaggcggggcaggattttaaccgcaattgccatttgtaagcattggcagttgctgggatactgatatgaatatcccgtgagtccacaagacaaaggcagaggttaagcctggacacagggaaggccagcgttaagcagtcctgagcaaggggtagcctggatgatcactactcgattctggctctgtaaaggtgccccaggagagtctgattctcatgagatgattgatctgcttctgaggtcccactggcttcaagggtgagttgttcctaagatctaaggtgctataggtttaggacagtggctggtgactctgagacacttttttggagatctgaaagaggatgtaaaagcagactctatgccctcagcctagaagagggtaggctaggttagctgtccctggtttgcagacactccctgtctgcctcctgtggcttagcatgaacaggtgcagaatgaaggcagagctgcctttaaagagcagttggtgacacatgtactgggttgtagaggcaggtggagctgtgaggttggagctagcctgatctacatagtgagttcagactagacaaggctacagaatgaggccttgtctcaaaaaacctgcagtttgtaagagcccaattgtctgctctgtggtctctggtgttccctgtgcgtcctgggtaatatccagtgatcccacaagaaagggcggagatcagtgtagtcccacaaaagcaagaactcagagtcatcttggacatctcatagcagtctgccctcactgtcccctagagagaggtgggcctcttgccactgcacagttctgtctggatgtagcatttgtcacccaacaataacacctattggaggcaggactcctgcaatcatgagaatacaatgttttggaagtttatggtgccctgtgtcacagtgaccactggttggttcccctgtccttgagtgcactgtcttctccgcttgacacccttccatgactcctgggagtcttctctcttccaagaccatgtcctcagggaccatactggtatctagggagtcagttgtagttggtgtccctcttctggacctctggtacttctgacagatcttcctacaggcagtttcctcttaggctacatagagcaactctgccagagtctcctccccccgcccccctggaagaaacaaggcaaggtgacctggtagggcaggaggacaccttcctggctctcaagcatgtctgtgatgaaccttacctccagatttacctatagacgccatcctgatctctgtgaagtagcatagagaagctcaacaatgcatggctggcatgagaagcagaggcagcatggtacatatttgtagaaataacaaacaaagcagtatgtaagtacacacacacacacacacacacacacacacacacacacacacacacgacataggtagctctaggaaggtatgttcagaacaaaagggtgttgttccctggaggccagggttcaggggacatgtgcgtgccacttacctctgcttttctgtttatatttgctccattttctgtgttacttattccaggatgtaatgaaataagattccacatttcttttttttttttttgtctttttttttattagatatttactttatttacatttcaaatgttgttcccttccctaatttcccctctgaaaactccctctcccctccccctgctcaaccaacccacccacacctacttcctggccctggcattcccctacactgaggcatagaaccttcacaggaccaagggcctctcctcccattgatgaccaactaggccatcctccactacatatgcagctagagccatgagtcccactcatgtgtgctctttgattggtggtttagtccctcggagctctggggggggtactggttagttcatattgttgtccctcctatggggccgcaagctccttcagctccttgggtcctttctctagctccttcattggggaccccatgctcagtttgtatttgtcaggcactgttggagcctctcaggagacagctataagaggcttctgtcagcaagcacttgttgacatccacacaagtgtctgggtttggtgactgtatatgagtggacccccaggtggagcaggctctagatggtcattccttcagttcaaagagcttgaggctgaaaagctgagctagcgaaaacagaggaagcagtctttttggccacatcccctttgccttgcaaggaaagtgcagaggtcttttttaggggctaccttcttctgtctgaacattcttgtcctaatggtctcattctgggaggaagctggagaaggaggctgtagtcctcactacatttaactagaaatgaaccctgcggtgagcggtgcaagtgtagtggctttgccctgctctgaggacttcctccactgagctctggcttccagctgcagtgagctttgttactgagtgaggcctagtctggaatgaagagagtggcgtccagagctagggaagtactatagagcacttggtgtattcctagtgtgacttgcgtgcctcctctagagacaatccaaagtcacgtctcaaagttcagtttgccagcacaccagaaagccaccttacgctcagtgatcaatggatttgttttcttatattgattggcgctttgattcgtctgcttcctggtttctgccctggactttccagcaagctttaaatgagtcttacatcttggcttgagtactgtttgaggtctgatgactctggagcacacctgggctgagaactgctcttgtgagcccagaatagatcccaagaaaatcagctcagcaacctcctgtgtgcagcaggctgttgtcttgtaagactgttctcacctcccacctgacagggcttcccaggtctgagtgagacagcttaggacagtaacaaggtctcttccctcaccaacaactgaatagcacatgggctttggggctgccctcttctcagctggatgatggagacctgctgccaggctctgcccctgtaggtagcacctgtgaggcctgccagcctctctaaagagtaagctagaggtgcgactttgtccctggggttgctgctctgcaggtcacttagtctgtgtcacagctgcttacctttgctgatactgtgggaataaaaccaatagggaggtgactggacgtggtcatgtcccagtaaggctttgcctgcagtatgctagcacacagaacaagaaaccctccaggcctggtggcatgcatgttctgaaggaggctgagtgattgtatgagcacagccaccactgtcctgagtagtcatcctcaaggcgccacttgaggaaccacaggaagcccagtgagagtgaggggactccagggttgcttaagatatgcaaggtctggtagcatttaagcaccccctgcctgccatgtggagtggattggcccaggcacatgcccagagtccaggctgaagttgtgaactcaggggtgatggtcagtgatgagtttgctgctagactttgagaactactggttgagttacattgaagcctttggaactgagggaccaggctcagcatcagcactgtttttatgggaaggaccatcactgagagtacccttctgaggctggaattagacaggtagccatgtttcccagactgtcttgagcctcttgttttccgtcccaaatgtatggatatcatagggctgctaggatagcaggcaggcaccagcacacccacagcagttttagactgtagtggggcccttggtattttggtaccccagccattgtccctataaagccctctattactgttggccagggctttctcactctcttttgctacccccctcagccaggaagactcttgctggagctgacaccatgattgttttgacccctcatttcaaccttgtacgcatcctcagtggcctctgcctcctcatcttttacagaacttgatgggaaaaggctcttgcctcaggttagagatacagctaaagaggagagaacccatggtccactcagagtagggctgcgtctgtgagggaatgacacatttcccccatacttttatggacacagtaggttatgccttcaccactttgccttcagtggtagccagccatctctcccaagtcattgaagcaggttgtattactgtgggctttcctggtaggcagatgtttgatgactagtattattggactgggtaaggaggaggaaaacttttgagactatcccacatacattcctctttgcaaggggtctccagggcatcctgagttatggctgagagtctaagagtagatctgtccattgaacacatatctgcagcctggctctgggcccttccatgtcatgtggcagtcctcagccccaccctccccaaggctgtgaaccatgccttggtcaccaaacactggcaaatgccctatcctcttaggtggacagcagcagaggaccctgttgaacatcgcagcacagctgttgtacccctggatgcaggtgtttcagggaagcctgtcatctttggctctgggatgaggctttgctatgagatgaagggatgcgtggcagagcacttacatggtgcctaaagctagctcagacaaagcccgggttagtgggccttccaggctgttttaaaagtgagaaacatacacactgacatgaaacctcatttcttccagttacactgaccagttggagctggccagatactcctccctctgtgtgatttctgctggtctcacatgtgactctattccctgtctgtgtcatttgcatttaagctctgacttcatccagatctcctcctgtcttgcagggacatcaccccacctggagaaccgctgaacaagagcagcaggcccaaagcagtttcccgcttccctaagctgtcccgaggccaccccagggaggtgcgcaacgtggaacctcaaagtggtgacctctgacctcggtggactctcagcccccagccactttgtgctcaaccttgccatggcagctggccctggacaccttggcaggatgaccatgtccccacagagaacacacccttcctgctgccacatgccacccaattaaactggtcagttttagctgctgggtctctgtccttagagcaaagcattgctcactggacagacacagatggggactctgtcactaaccccagggtggccaaggatggttgtcacctcctccagttctgccaacagacagtgggtgccaggctgggcccagacccctggctgagatgcacaacacatggcagaaggatccttcggatgccacctgtgacgctttcccacgtgggaaccagaatgactgttatactcttgaatttcctgatgcaaatgcctgctgcagctggtggatggggtctgcttccctgtcctcttccccctagggtggttagacacccaacggtactgccacgtgcctggtatggatgtgatttctccatctagtggcccagcaaagcaattggcagtgacttggttcttgaggaacttatccttccctcttcttgctggcacaggaagcaccctacacacatacacatacatacatacatacacacaggaaacctgaggctgccccagcaaggacctccacccgccagcacagccctcagcagcagcctgaaaactctggcccaagaattggtggctgtgacctcatgtcactagtgatttggctctggacattgctgtggaaggctggccctataggctctcagacccagtgcagaactgaaaagagaatgattgtcctctgaacgtgtttagcaccaactgtcccctaacatctcagtgggagcaggatgctgtgtcctcacaagatgtagttctattgctctcgtctcagggtcccatcctagagttcagggctcacaggtatggagtggaataagatccagctgctttgcagccctgccttcctctgccatcaagcctgggtctccccgattctcaggatcccctgtctgtggtggtctgtctccctaagtcagaacctccttgctgtcttcatgcagtatggaggaatttgccgaagggaccacgtaccaagcagtgtgcacttctctgccaaggaaggagttcacagtggcacctaccaaggggcagctacttaggcagttgtgggagggagcctgagcatgaactcgaagggctgaagctcaaagctagacctgggtgagtggtctggggaagcagagttttcctggcaccttggaaacttgggggaagtagtctagaaaccagagaggacttcagagtgcagggggggcctgaacagctccagttctggaggttaccttgggacagacaggtgggctgtgcacaggtgaggcagagcattcttgtcctccctcatggctaggggcaggagctgaggggagcagagaaaccctcttcagcttgctgggaaggagctacccaagaggcttctcagacctagaaagccaacatggttcctctcttgtctcctgagatgcttcaggcttcacacaaaggccacaccagagtgtgggctgggcatgcactttgcagttgggcaaactgaggcatgcagaaaggccctatggggctttggtagccccaagttcacctcctgagctgggggacccagcatggggctgcttcatattctatcatgttctgtacagacaggatcctgctacacctcccacagcagagtcctgagcaccagggctttgggacacctagcctaaacacgtgtcactaagagtctgagctctctcactgcaaacagcatatatagaaccatctttcacattcagcactggagcactggcagttaaagcaggaaggacagaagggagggagggagggagggagggagggagggnnnnnnnnnnnnnnnnnnnnnnnnnnnnnnnnnnnnnnnnnnnnnnnnnnnnnnnnnnnnnnnnnnnnnnnnnnnnnnnnnnnnnnnnnnnnnnnnnnnnnnnnnnnnnnnnnnnnnnnnnnngaaggaaggaaggaaggaaggaaaaggaaggaaggcaggcaggcacccggacttgggaccttggttttctaggattaattatggggaacttgcccaattttgccataatgtgctataaaggctgggttccagggactttgtaagccctttggttgcttgacatctgcctcctacccagtctttttccccgtcttggggattgacactagggccttgcaagtgctggacaaaaactctccagtgagccacactctagccctgcccacactctgcttccacagaaacccagcaaactcttggttccaggttgcccatcttatacctcacaagagcatgttgggactcaggcggagcggtgcagggcagggtcaggtgatggaaggctgttcccacaatgctccccagatctgaggcctagagtgcagaggggagttcagagctgtgctcgcccggtctgatacaacctcaggtttacaggagactgcttcctaatcgtcccctgactgcggccttgccattcttgtggctgctaaaactctgtttctataagcgttcacatgtcctgagggcaagtcagtgtcctaggccttgattactgtgtcatctattcctgttccatctgtctgtgtaacctgtagacacaactggcccctgaggagtggctgggctctgtcctcccaggcccaccatcagactccctcacgttggccgcctacacctgcacctgcattcacccactcaatgtgctcagctgagggactcctgagagtgttctgccagcaggacgacgcaggagcaggcagtctcaccatggtgcccagccgctgcctgctctgttatctgggaagtatacaagaaggagcggtctcgtgcccatggcaataacagtcctgattgctcaacattcctgttagagacattgctacccactccagaggcacagcctggcctgggagctgtgacctccttatgaacaaggtctattgtaacaaacattctttaaactattgtgcattatttcactaaagatagtgttaagtgtttgctgtttaggttggttttgctacctttgcacaactgtagcactgtatatcttatctaatatttctgtgccaaaaagttcaggctctgttgctgtgatatgtggtctccattctacgtctaaagtcaagtctaggcagtgggtggggaggggagagagggcagcgtcagggctggagtggctgctgtgtggaggcctggggttcacttctcacggggccatgttctcctgccctgaagacatcgctcaccacctgttccagtgccacctgcagcctgctcagctctgcccttaccaggaggcaaccacttgaccacagggaggtttggttttgtttttgttttctttttcatcagtaggacagattgggaggacccagcaagaattgggacatgggacacgtgacagtggttcgcacagggtcactgagcacctgggaagaggacctgagagctgggacctccaggggagagaaggccctggtctgctatctccatccagcctggaaaggtctctgaggctactccagccctatgtctggagcctgcgggtgcaaacatcccagagatctgagcatgtgctatcccgactccctcttatgttaaggtttacacgatagaatttttaaacaaatatgtttaattttctaaaatctcttgtattaaatttttcttttggaataagctgtggattttgttacaatcctggtcgagagaagccttttcagtgaggggattaaaatggcattttctaaattagaccttcttctctgtggttcctttgtctagattctttactgacagctgggatttcagtgaactatatacatatcacaagaaagcctctaaagtttagaaggttcacttatcacttcaggcaacactacatatcaaaatgtggttccactaacacagctttggtgaattaaacattgggagtcacttgtagtattagactgatcttggtaaagtggaatgtagaataatagtcttacacagaaaaaaaaaaaaaaaaaaacctcatcccatcctcatgacaggttacagtccagacacaggtaannnnnnnnnnnnnnnnnnnnnnnnnnnnnnnnnnnnnnnnnnnnnnnnnnnnnnnnnnnnnnnnnnnnnnnnnnnnnnnnnnnnnnnnnnnnnnnnnnnnnnnnnnnnnnnnnnnnnnnnnnnnnnnnnnnnnnnnnnnnnnnnnnnnnnnnnnnnnnnnnnnnnnnnnnnnnnnnnnnnnnnnnnnnnaccaccctcattaaaaagccccagaggctgaggtccaggagccaccttggtccttggaggaagtctgatgatggtcccttttggtccagggtcttgatggtctctgtgctcccagactgtggcttcagctcccagttcctgtgttcagtgcgtcctgtaaaagagggtacagtaaaaccactgcaccaaaccacttgttggatagaaaggtttgttggggatcaaaatgccaacactatctctcagtgtgtgtgtttgtgtgtgtgtgtgtgtgtgtgtgtgtgtgtggtggaagagcagcaaaacagtggaaaagtcaactggattttctataatagcaggtctggggcctttgttgggatgacaagatgcccttgcctaaggtatttgacctttgggggggtagattggcaaagtccaggtaaatagaagctcgccttaggagactcctaatgctgagtttaggctactatgtgtactgtaagagccttctgtccacccagtcagaggcctgcttaggacactggcatcagtacagccatgttggaagacccactctggaaccaacaaggtcctaaatagcatcatcacctctagaaggcttttttctaccagtcacttttaccccttatagagcagctgctcctgaagtctagaccaagccttccccacaccctctcctgggctggggccatgttgagaagctggggttggggggaaccgcagcagtaggagcaggaacaaaagattccatgcagcagattcatggaccttgagattccagtggggacctgcaccaggcgctgtgaggagctgcgtggcccttcctggctctactgagcccttcagttctgtctcagacgttggcctgagcctgcttttccaacttaccttcagcctttcaccctttactccctttgcccccagctttctggtctcattcccaggcaagccacatctctatctgccccaggccctttgcatgtgctggtccatcctgctttctgtgcctctttcatacatctatcaggaccaacttcaagctcattttccaagataaacctttgacactccaagctaccatcattccctccacaacagtctgactgagtcacctcatacatggtgatactctctgcaaatttcatgaagtcattgttttttaatagctgagtagtactccattgtgtaaatgtaccacattttctgtatccattcctctcttgaggggtatctgggttgtttccagcttctggctattataaataaggctgctgtgaacatgtggagcatatgtccttattacatgttggagcatcttatgggtatatgcccaggagtggtatagctgggtcctcaggttaatgtccagttttctggggaaccgccagactgatttccagagtggttgtaccagcttgcagttccaccaacaatggaggaaggagtgttcctctttctccacatcctcaccagcatctgctgtcacctgagtttttcatcttagccattctgactggagtaaggtggaatctcagggttgttttgatttgcatttctctgatgactaaggatgttggacatttctttaggtgtttctcagcccttcaagtttcctcagtagggaattctctgtttagctctgttctgcattttttaatagggttatttggtcctctggagtctaacttcttgagttctttatatatatatattggatattagccctctatcggatgtaggattggtaaagatcttttcccagtctgtttggttgccgttttgtcctatgacagtgtcctctgccttacagaagctttgtaattttatgaggtcccatttgtcaattattgatcttagagcatagtgttctgtataggaaatttccccctgtgcccataagtttgaggttcttcccctctataagtttcagtgtctctggttttatgtggaggtccttggtccacttgaacttgagctttgtacaaggagataagaatggatcaatttgcattcttctacattctaaccgacagttgaccagcaccatttgttgaatatgctgtcctttttccactggatagttttagcttctttgtcaaagatcaagtgttcataggtatgtgggtttatttctgggtcttcaattttattccattgatctacctgcatgtatctctaccaataccatgcaattttatcactattgctctgtagtacagcttgaggtcaggggtgctgtaggtttcttgtatgttgactgtcatctctttctttaggttagggaagttttcttcttataattttgttgaagatatttactagtcctttaagttgggaattttcactttcttctatacttattatccttagatctggtcttcccattgtgtcctggatttcctgggtgttttgggttaggagttttttgctttgtgcattttctttgagtgttgtgtcaatgttttctatggtgtcttctgcccctgagattctctcttctatcccttgaattgtattggtgatgactatgactcctgatctctttcctaggtcttctatctccagggtggtctccctttgtgatttctttattgtttctatttccatttttagatcctggattattttgtttaattccttcacctgtttcattgtgttttcctgcaattctttaagtgatttttttgtgtttcctctttaaggacttctacttgtttacctgtgttcccttgtttttctttaagggagttacttatgtccttcttaaactcccctatcatcatcatgagatgtggttttatatcagggccttatttttctggtgtgttggcgtatctagggctggatgtggtgggagaactgggttctgatgatggtaagtaaccttggtttctgtgttttatgttaaggcccttgcttctcaccgtctggttatctccagtcttgctgtctctgactgtggcttgtccttcctgcaagcttctatgtcagtacttctgggagaccagttttctcctggaggaatttagatatggatagctgtggtacagggtcagctgtggggtgcagacagaaaccagaaggatcttgtccccagctgatccttggttcctgtgtcctaatgactctgggtgggtccctcctgggcctggaatttgaagagaagtggtggtgttacctctgcttgcaggtatggcactccttggagacctgctctctcctggtggtgtttgtagcgctgtgatacagtatcagctccaggtgcagatggaaacgggaaggcttctgtcccaggctgctccttgattcctgtgtcctgggggttctgtgtgggtccctctgagctgcagtggtggtataacctgtactcacaggcttgtctgcactcctcggaggctagctctctcctggtgctatttgtgtataaagccctgtggcagaagattagctccaggcagagatgaaaactggaagtggccaacattttctaatgttgggttttgcaacaccatcttcacactttgaaacccacaaatggacaaaccaaaattagacaaaaagccacacaatactccatgctggtccactgctcctgggcacaggcctgctctgaggtgttaatgcactcacaagattcctgcttcagcaggagctagaagagatgaacaggagactgcacgctgtcacccctcccccagggcatgctgataccctcccccacttcaaaacaaatgaactcaggaacactgagctatggggaaatgagcctggtagtgaatgaaaaaccggacgattcccacttatattagaagacgtagactcagatggtgggttagagaggttaaggagggcagcagggccttgacaagatggaagaccatagggtcgggtggcgttgtgggtatacaatgttatgaacatgtttataacactgaactacatcacctgcaacaatccagaagaactttattttatgtcatgggatttaccataattatttattattaagtgcaacaacaaaaaaataagttctttgtgctggaaatttaaaaactacagttaagagaaagcaataaatggggtgcattgtactggtagcgcagaacataaaacaaaaatcaggttaccgtttgatgtctgctaacagaaaccctgcagggagaagtcacattaactaggagtggacagaagagggtgagaaaatgcctagtgagccagcacttggagatgtcagtgctctgaggctagggagggaattaggtggatagagggagccactaacccaaagcagtctgaactttcacagccggggttctgagttgagggagcccagatatcctaggcaatgccctcaacagatggatggagagtccccactgccctccaggaaggaggttcttggacagctcaggcagaggagcgtcacctgctgtggtccatgagtgatgggagtgcagggtagggatgggagaagcttggcgatgggaaaggggggtgttggctagtgcagaagggtatggggaaaggatggaaacagtggggggctgggggaggatgcgggctggggagggtccctcatattctaaggaggatgagcaccatttacaggcagccaggaacagaatgacaccaaagactctgctttaaaaaaaagcaacccctgtggccagcctttaattctagcactcaggaagcaaaggcaggtggatttctatgagttcaaggtcagcctggtcttcattgtaagttctaagacagccagggctacatagagagaccttgtttcaaaaacaaacaaaacccgcccatgggtcaacaagatgggttggtgggtaagaaggtacttactgcacaaacctgaagaaacccactgtgggatgggaaagccaagtccacaaagctatgctctagcatccactactacaatactccccactccatcacctcacacaaaaataataaaaataaatcaacttttaaaacttcacttaatattttaaatttatttatttatttatttattcattcattcattcattcattcattcacttcacatcctgatctctgccctctcctcctcctgacctccctgacagcctctccttagcccctctccttctcctctgagacggcagaggccctccttgggtatcaatgcacccaggccatgttgggttgctataggaccagataaggcagcacagttagggaaaggcaggcaccagagtcagggaaagttcccgctctagttgtttggggtaccagcatggaaaccaagctgcccatctgctacgtaagtgtaagggggcctcgttccagcccatgcttgttctttggttggtggttcagtctctgggagccaccaagggccaagggttggtttattctgctggtgttcctgtggagtctctatcccctttgcacccctcaattcttcccccaactcttcctcaagacttcctgagctccactaatgtttggctgtgggtctctgcatctgttaccatcagctgctgtgtggagcctctcaaaagacagttatactaggttcctgtctgcaggcgtaacagagtatcattaacattgtcagggactggtgcttgcccttggaatgggtctcaaattgggccagtcactggctggtcttccctcagtctctgctccatctttgtcctggcacttcttgtaggtagtaacattttgggttaaaagttttgagggtgggttactgtcctaatttctccactgggggtcctacctggctactggagatggccacttcaggatcaatatcccccactgc

SEQ ID NO: 72 - DNA, 1622 bp, Mus musculus
acaaagcagtgttgggtggccttgggagctggacctccatggaccatggacagcctctgtccagtgtacagcggcatcatgattgaagagtctgcagagaagccggggcaggagctgagcagtgatgaatggcttactgagacactggatgggaacgcctgcctggcccaggtccatggctgggctccactgcaggtgcttcatggagatgcggatgctgacactgatgtactcttccctgtcagtggagtgggctcctatggtgcagcagatgcccctgtgggaagtctggagaatggaacaggaacagaaaaccatataatcccagagcctggccttcggtacagggaagccagttctccaggccaaggaagtcctctgagcagcttgctaccttctgcctcagtgcctgagtccatgacagtccatgaactgcgccaagccatcgtggccatgatgaacagaaaggatgaattggaagaagagaatgggtcactgcggaatctccttgacggtgagatggagcactcagcagcgctccggcaagaggtggatgccctgaggcggaaggtgacagaacagcaggagcgccatgccacaaaggtccaggcactggccagagaaaacgaggtgctcaaagtccagctgaagaaatatgtaggagctgtccagatgctgaaaagagaaggtcaaacagctgaagctgtacctagtctctggaacgttgatgcagaagtcacagtccctgaacagaagcctggggaagttgctgaggaactagcaagctcctacgagaggaaactcattgaggtggctgagatgcatggggagctgattgagttcaacgagcgtctacacagggccctggtggccaaggaagccctggtgtcccaaatgaggcaggagctgattgacctccgaggaccggtgcctggagatttgagccaaacatctgaagatcagagtttgtcggattttgaaatatcaaatcgggcactgatcaatgtctggatcccgtctgtgtttctccgaggcaaagcagccaatgcgttccatgtgtatcaggtctacattcggataaaagacgatgagtggaatgtgtatcggaggtacaccgagttccgggcgctgcaccaccagctacagagtgctttcccgcaagtgagggcctacagtttcccacccaaaaaggccatcggaaacaaggatgccaagtttgtggaagagcggcgaaagcaactccagagctacctacgcagcgtcatgaacaaggtcatccagatggtgcctgagtttgctgccaaccccaagaaggagaccctggtgcagctggtgcccttctttgtggacatcaccccacctggagaaccgctgaacaagagcagcaggcccaaagcagtttcccgcttccctaagctgtcccgaggccaccccagggaggtgcgcaacgtggaacctcaaagtggtgacctctgacctcggtggactctcagcccccagccactttgtgctcaaccttgccatggcagctggccctggacaccttggcaggatgaccatgtccccacagagaacacacccttcctgctgccacatgccacccaattaaactggtcagtttt

SEQ ID NO: 73 - protein, 474 aa, Mus musculus
MDSLCPVYSGIMIEESAEKPGQELSSDEWLTETLDGNACLAQVHGWAPLQVLHGDADADTDVLFPVSGVGSYGAADAPVGSLENGTGTENHIIPEPGLRYREASSPGQGSPLSSLLPSASVPESMTVHELRQAIVAMMNRKDELEEENGSLRNLLDGEMEHSAALRQEVDALRRKVTEQQERHATKVQARENEVLKVQLKKYVGAVQMLKREGQTAEAVPSLWNVDAEVTVPEQKPGEVAEELASSYERKLIEVAEMHGELIEFNERLHRALVAKEALVSQMRQELIDLRGPVPGDLSQTSEDQSLSDFEISNRALINVWIPSVFLRGKAANAFHVYQVYIRIKDDEWNVYRRYTEFRALHHQLQSAFPQVRAYSFPPKKAIGNKDAKFVEERRKQLQSYLRSVMNKVIQMVPEFAANPKKETLVQLVPFFVDITPPGEPLNKSSRPKAVSRFPKLSRGHPREVRNVEPQSGDL

SEQ ID NO: 74 - DNA, 1725 bp, Mus musculus
gttttctgtagcccaggctttcctgggacaggacaggcagttagtagaccaggctagctttgaaattctcagagaacttcctgcctttgagtgctgggaataaaggagtgagccagtctgctcactgtgaacatcgttagtgaggagcgcgcttgtctgagagtctggagatgaccttgtaccgtgatactgaatgggaacacgtcgtcggaagtgcatgtgtgctttcactgcaaccgtgacactggatgggaacgcctgcctggcccaggtccatggctgggctccactgcaggtgcttcatggagatgcggatgctgacactgatgtactcttccctgtcagtggagtgggctcctatggtgcagcagatgcccctgtgggaagtctggagaatggaacaggaacagaaaaccatataatcccagagcctggccttcggtacagtagggaagccagttctccaggccaaggaagtcctctgagcagcttgctaccttctgcctcagtgcctgagtccatgacagtccatgaactgcgccaagccatcgtggccatgatgaacagaaaggatgaattggaagaagagaatgggtcactgcggaatctccttgacggtgagatggagcactcagcagcgctccggcaagaggtggatgccctgaggcggaaggtgacagaacagcaggagcgccatgccacaaaggtccaggcactggccagagaaaacgaggtgctcaaagtccagctgaagaaatatgtaggagctgtccagatgctgaaaagagaaggtcaaacagctgaagctgtacctagtctctggaacgttgatgcagaagtcacagtccctgaacagaagcctggggaagttgctgaggaactagcaagctcctacgagaggaaactcattgaggtggctgagatgcatggggagctgattgagttcaacgagcgtctacacagggccctggtggccaaggaagccctggtgtcccaaatgaggcaggagctgattgacctccgaggaccggtgcctggagatttgagccaaacatctgaagatcagagtttgtcggattttgaaatatcaaatcgggcactgatcaatgtctggatcccgtctgtgtttctccgaggcaaagcagccaatgcgttccatgtgtatcaggtctacattcggataaaagacgatgagtggaatgtgtatcggaggtacaccgagttccgggcgctgcaccaccagctacagagtgctttcccgcaagtgagggcctacagtttcccacccaaaaaggccatcggaaacaaggatgccaagtttgtggaagagcggcgaaagcaactccagagctacctacgcagcgtcatgaacaaggtcatccagatggtgcctgagtttgctgccaaccccaagaaggagaccctggtgcagctggtgcccttctttgtggacatcaccccacctggagaaccgctgaacaagagcagcaggcccaaagcagtttcccgcttccctaagctgtcccgaggccaccccagggaggtgcgcaacgtggaacctcaaagtggtgacctctgacctcggtggactctcagcccccagccactttgtgctcaaccttgccatggcagctggccctggacaccttggcaggatgaccatgtccccacagagaacacacccttcctgctgccacatgccacccaattaaactggtcagtttt

SEQ ID NO: 75 - protein, 459 aa, Mus musculus
MGTRRRKCMCAFTATVTLDGNACLAQVHGWAPLQVLHGDADADTDVLFPVSGVGSYGAADAPVGSLENGTGTENHIIPEPGLRYSREASSPGQGSPLSSLLPSASVPESMTVHELRQAIVAMMNRKDELEEENGSLRNLLDGEMEHSAALRQEVDALRRKVTEQQERHATKVQARENEVLKVQLKKYVGAVQMLKREGQTAEAVPSLWNVDAEVTVPEQKPGEVAEELASSYERKLIEVAEMHGELIEFNERLHRALVAKEALVSQMRQELIDLRGPVPGDLSQTSEDQSLSDFEISNRALINVWIPSVFLRGKAANAFHVYQVYIRIKDDEWNVYRRYTEFRALHHQLQSAFPQVRAYSFPPKKAIGNKDAKFVEERRKQLQSYLRSVMNKVIQMVPEFAANPKKETLVQLVPFFVDITPPGEPLNKSSRPKAVSRFPKLSRGHPREVRNVEPQSGDL

SEQ ID NO: 76 - DNA, 527690 bp, Homo sapiens
  misc_feature (1)...(527690): n = A, C, G or T/U
gaatattttccaaagtgaagcattgaagatcattttggtaatggtagcatccttcgcatcaaagtgactgcttagaaggaacagtttcaagatgtgctctgtggtgtgtttatttaaatcagaggcagaggcctgcgtccattctgctcaatcttctgtacacagattttcactgaggattttaaaaagtctgaattcatgttacagtgtatttctcactcgaatagtattttccataacctggaggtgagttggttccatcatccttttgtcttgcctcctttttcttatactgtatctttttttttttttttgccagatgccaaatgcaaaaaggagcggaagaagaaaaagaaagtgaccaacataatctcatttgatgatgaggaagatgagcagaactctggggacgtgtttaaaaagacacctggggcaggggagagctcagaggacaactccgaccgctcctctgtcaatatcatgtccgcctttgaaagccccttcgggcctaactccaatggaagtcagagcagcaactcatggaaaattgattccctgtctttgaacggggagtttgggtaccagaagcttgatgtgaaaagcatcgatgatgaagatgtggatgaaaacgaagatgacgtgtatggaaactcatcaggaaggaagcacaggggccactcggagtcgcccgagaagtaagtttgtgtgtaaggtggagtctcaccgtcccccaggctggagtgccgtggcgtgatctcagctcactgcaacctccacctcccgggttcaagctattctcctgcctcagcctcccgagtagctgggattacaggcacctgtcaccacacccagctaatttttgtatttttagtagagatggggtttcaccatattggccaggctggtctcaaactcctgacctcaagtgatctgcctgccttggcctcccaaattgctaggtttacaggcatgagccaccacgcccagccttcccttgcacttttaatgagggggttaagttcactgttttctctttctatggtattgggtaaaataggtctgcaagctttatatttgcccagggtatcattcattcttcaggtgttgatttaggagtgttatttggaaggagtattatttgctcttcccctgagaactgaaagaggggaagggagtacatttgagggcacttaatacaaagttaatgtcagaatgtgtgccttgaaattcttgctttatacatacatctgtcattttcatttcacagggttcacagggtttcacagtctgatgagactgtgcctgttattgttttttatttttactctggattttccttgcatctgacttgccactagcacaggaagctcaggacgaaggcagcgttaggagaatagttgtggtatggtgacttctgtgtttatctgcaggggtgtgaatagccgtaacttgcctgcacctgctgccttaacagtggagttggccaggcgcagtggctcacacctgtaatcccagcactttgggacaccaaggtgggtggatcacctgaggtcaggagttctagaccagcctgaccaacatggtgaaaccccttctctacgtataaaaaaatacaaaattagccaggcatggtggtgcatgcctgtaactccagatacttgggatgctgaggcaggagaatcgcttgaatatgagaggcggagccaagatgatgccattgcactccagcctgggcaacaagagagaaggtccttctcaaaaaaaaaaaaaaaaaaaaagtcccccaaataccccaaataagctagttacctcttaggctttgtggtgcgcagtgccctcctaatcatgactactgcaaaatccagtccattaaagtgtaaaatgaggccaggtgcagtggttcatgcctgtaatcccggcactttgggaggctgagttgggaggattccttaaggccaggagtttgataccagcctgggcaacacagcaagactctgtctctacaaaaaaataaaaagtataaaatgaatatacagaaatgtatctttctatctgacctaaatcttatggtattgtttaggctgcagtatacccttagccctaagatttttgttttcatgttgttacaatattagggttttttttttttttctgatgagactgtgcctattattgttttttatttttactctagtcctcatctgcatggatgcttgtactagtagtgttaccttattgatcatctgagatatgccaggtgctgcagatgatttataccctatattgtaagacgtctagcagccctatgaggttcatgggtatcacctccattttacagacagaagaacaggattccatagggaggcaagatttgtgaaagccattggctaaattgagatttggattcaggtatgctgtaatccaaagcttatattgtcagtttttgttttttttttttgagacagagtcttgctctgtcgcccaggctggggtgcagtggcgtgatctcggctcactgcaaactccgcctcccgggttcatgccattctcctgcctcagcctcccgagtagctgggactgcaagcgtccgccaccacgcccggctaatttttgtatttttagtagagacagggtttcaccctgttagccgggatggtctcaaactcctgacctcgtgatctgcccgccttggcctcccaaagtgctgggattacaggcatgagccactgtgcccagctattctgtcaaatgtttttcatgtttctacttaattatgaatattgatttgttgatgtaatggttaattttgtgtgtcaacttaactgggctgtgggatgcccagattgaatattctgcttctgggtggatcagtggggatgtttctgggtgagggaagtgtttgaattggtggactcagtaaaggcgatagccctccccagtgtgggtggacctcatccaatccattgaaggcctgaacagaacaacaagtgaaggcagggagggattctttcctttccgcctgctagcttcagctggaacatggcttttcggccctgggccagggactcccactatctgctctcctggttctcaggcttcagacttggacttcaccacacccccagctttcctgggtcttcagcttgtggactgcggatcatgggacttcttggtccctgcagttgtgtggagcagttcctcaatataaacctgtatttgtatctctctgtctctctctcttcaggcacacaccccttggttccatttctccgcagaaccgtggctaacgcagttgcctttcagtcagatcaacatattatgacttgtgaaatgtttccccttttgttgggtatttatgctgatggtttttgtttttgctttttgttatcagcggatctcaaatgaatattttcacacgcaagatttttttcctacgagtgaactgtttgttagggcagcttttcagcagccttgttcttgctcatagggtatgaatgtttttgtacctggcatccaagtcttgtgacctgctgtgttattcagggctttctagagaaacagaaccagtgtggtggggctgaggcggacgttctgtgtgtggatgtgtgtagttccttctctgtcctgctctattttttctcaatttctacctctatctgtacctctaactccatttctatctctgtttctgtgtctctgtttcctttcttttttttttttttctgagatggagtcttgctttgtcacctaggctggagtacagtggcacgatctcagctcactgcaacctttgtctcctgggtttaagtgattcttgtgtctcagcctctcgagtagctgggattacaggtacctaccacaccccgctaacttttgtgattttagtagagatggggttttaccctgttggccaggctggtctcaaactcctgacctcaaatgatccacccacctcagcctcccagagtgctgggattacaggcatgagccaccacgcctggtcttatcttgatttattttaaggaattggctcatgtgattgtggggctgggaagtccaaaatccacaggttaggtgtgtggactggagacccagggaagagttgcagttcaggtccagaggcaatctgctggcagaatttcttcttcctttggaaggtctgtctttttcctatcgaggccttgcactgcttgcatgaagcccacccacattatgcagcgtaatctggttcacccagaatctactgatttaaatgttaatctcatctaatagaaacagctagaataatgtttgaccaaatacctgggtattgtggcccagcaaaattgacacatacaattaaccctcacaagtgcctttattcttttttttctggaacagagtcttactccatggccccggctgtagtgcagtggtgcgatctcagttcactgcaacctctgctcccaggtttaagcgattctcctgcctcagcctccagagtaggtgggactacaggagtgtgccactatacccggctaatttttgtatttttaatagagatggggtttcaccatgttggccaggcctgtattgaactcctgagctcaagtgatccacctgcttcagcctcccaaagtgctgggattgcaggcatgagcctctgcacctggccatgtgcctttactttgtaatctgggcctttgaggagatgctgcttgctgatgccactgagtgtagccccatgggtgaggctggtgtgtgagccaaggcagcccccagcattgtgtgtaaatgcccaacacagtgcagggtgaccttcacttggcctgggccctctgaagccagagggcctcctgcagactctggacagctctccccggcattaagagggatcttgactgacccttccacagagcagcctggggaagacacagcggagtgatgggatggcctgctgagtaatgctttgattttgattctaagctagtgttcacagggaaggttgagggggctggtgcacagcagatgtgtgaggggaatgcagccagaccaggagaagctcactgtggattgccacagtgtctggcagagtctgctgccctgttgtctttaagaccctctgttggtcaaagttaggcttactcattggtttactggtcattaacccattctttgatgtctgaagaagtcttgtttcttctgcctctgtatttatcataagtattagctttgcgttttgtatttttctttacaagggatagtatttttattacggtcaggttttgttcttttgttctttttttgttttgttttgtttctttgtttgtttttttgagacaggtcttgctctgtcatccaggctggagtgcagtggcctgatcacaccctcaactcagggaactcctagtgtcaagtgatctccctgcctcagcctcctgagtagctaggactataggtacatgccaccacgcccagctaattttttatagaaatggggtctcaaggcattgctcaggttggtcttgatttcctggcctgaagtgatcctcctatgttggcctccctgagtgctgggattacaggcatgggtcactgagccaggcccagatggggctttttaaatcactttatatgtgctctatgataccggtagggaagtagggggaaacataattcagaaaggactacaaacatatgctgtgtctcgctattctgcatctcactagcagttaagcaaatgcaaagtgaaacaagactccatattttgcccatcatatttgcggagaccttgggttggcgccctggtggaagggaaagatcttgctgtcagtgagtcctcagttcctggcacatcccatagcatccacttggtgtctgtgggatgaatgaggctgcagggatggtgcacaggggctgacctcatagacagctggaagcagttgagctgggagcagttgatagccatgggggaaagcagtttgacaaactggcatgaacttaaggatgtttatcccacttggtttagcagtcccagtgcgagaagcagcccagagaacataccctcgattcagggaaaagttgctacatctagataccaaagttcttattcagagaagcagaacactggagttgacctaaatgtgcagccacagggggacggttaacagcagaagattttatagtttaagccttgacattttaacatttaggatctcaaacatctcaaatgatgtttaagagtgtctagtgttatgaagctgagctaatgagtacatatatacatacatatacatatatatatatattttatatatatatttttttttgagctgggttctcgctctgtcactcaggctggagtacagtggcacaatcttggctcactgcaatccctgcctcctgtgttcaagcgattctcctgcctcagcctcccaagtagctgggattataggtgaccaccaccactcccggttaattttttgtatttttagtagagatggggtttcaccatgttggccaggctggtctcaaaactcctgacctcaggtgatctgcccaccttggcctcccaaagtgctgggattacaggtgtgagccatcatgcctggcctaatgagttaatattgaatggaaaaaacaagataaaaaactcaacattttgcttcattacaactgtgtaaagaatagtccgcacagcaggaaagaaaaaaagacatgtgggaaactgagtctgacacagtaatgttttggataatgtggctgttgggtggtttattttttctctctcttcttttgggcattttctaagttttcaaataacgtgtgttaattgtcttgctgaggagcaacagttgtaataatgagtggttttaagccaatcaaggcaccagatactgaggcagtgtcagcttcaggaatctttaatgtcactcattttgaggcagtagcccttggggcccactggtgtttttttttttggtttttggttttttttttttttttgagatggagtctcgctctgtcacccaggctggagtgcagtggcgggatctcagctcactgcaacctccgcctctcgagttcaagtgattctcctgcctcacccttccaagtagctgggattacaagcacccaccaccacgccctgctaagttttgtatttttagtagagacggggtttcaccatgttggccaggctggtcttgaactcctgacctcaggtgatctacccgccacggcctcccaaagtgttgggattacaggtgtgagccacagcacccggcctgggtttttttttttttttttttttttttttctctgtggcccaggctggaggaagtggtatgatctcagctcactgcagccctcgacctcccaggctcaagggatcctcccacctcagcccctccagtagctgggtctacaggtgtgcaataccatacctggctaatttttaaattttttgtagagacagggctcgaactcttgggctcaagtgatccttctgcctcggcctcccaaagtaccggaattataaatgtgagccactggcctggccagcaatctttaatgtaactcattttgaggcggtggtccttggggctcacttctcgggtttggaacctcatcctcttggggcctggcttcaccttgtacttgcatatgttgcggggaagggtcaagaattatcttagaaaccagcagaacatcgcacctgccctgaggcagtggagtggcctagaaaggactgtctgcttttgctgccttctcctgaaagggcgcccctgaccacctctgggtgccggctccgtggtcaccagtggccaggtcagagcctcaggagggcgcctcttgacagattccagaggcacagccaaggtcatctggttctcccccaggttgggctcctgccaggacagtcgcgggagcggctcttcttttgcccccaccctgctgtctgaaagcctcattgtggtatgggcatggttgaatgatctgtcttgcaaacttctgctaggattatttcctcctgtgcttctcactctgtgccacatgtctggccaaaagctagagagggctgaaaggagacttctacctgacaagcctctaaaataggagctggcaatccctgcctgcggaccaaacccgcccccaagcagtgaacagttgttacatttttaaagagttattaagagacaccaagaaagaagactgtgtcatgaagcctgaaatatgtactctctggtctattacagaaaatatttgttgattttagagtagctctaacataaagacaaactatataagtaatgtcacttgtgggcaggagacgactcggtgcacttgagtttggaagacctgggctccagtcccacagccttggttctgttgcttagtgctgatggccttggacaagccacacactttttcttcttttgcctcccttccctttgtctgcccccgcacttcccttcttaagtaggtatgattatgatctgctttggtcttctttatctactgagatacagaatgatgtttaaaccttacagtacagctggctctctgcatccatggactctgcatccgtgagttccgcatctatggtttcaaccaactgtggatcaaaaatattaccaaaaaaaaaccaataaaaataatacaataaaaatacagtataacaactatttacatagcatttggattgtattaggtatcataagcaatctagagatgatgtaaagtacatatgtgggaggatgtgcttatgcaaatactacaccgttttacatcagggacttcaggctaggcgaggtgtcttatgcctgtaatcctagcacttggggaggctgaagcaggaggatcgcttgaggctaggattttgagaccagcctggacaacatagggagaccctgttttcacaaaaaaacaaaacaaaacaaaaaattagccgggtatggtggctcacacctgtagtccaaactcctcgggatgctgaggcaggaggctctgccaaatcccaagagctcaaggttgcagtgaactatgattgtgccactgtactccagtgtggacaacagagcaagactccaactctaaaacaaaacaagggactttgagcatcctcagatttgcaggggttttttgaaacggttgatacagatgtaatgcagatactgggggacggctatactgcaaaaatacctccaggtatttattaacatttcttgattgctcagaggcaagtgctgcaggggcaattactcccaaacaaacccaaccacactgcctggcgtttcgaagatggcacgcattagagatttgtactttgtgggtaaggtgacagtataacagatcatatgagcatggttaataattgagccgactccctttcttggaagggacccagacgtgactggtctgattctgtccttttacccacgaggggctcagatgcagcgaggcggagcaacgctagccctaggtcaggtggctgctgtcatttcggaacatggagcagatggcctgtgatgcatgtgctgtccccttccccaagcctttgtccctcctcttcactcggtggcttgggcttcctccagctcccctcctcaagccctgcttcttccaggcagccttccatgaccttcctggaatgagctttctccacaatctgagatgccatttacagcttcttgcaggattatttggttcatgttcatgccccccaacagactgcaggctccctcagggcaggatcaacagtattcactggctcttttgccaccagtagggagcacagtgcctggcatataataggtgctcagtaaacactggttgagagaacaaatgcaagaggtctggatctggactccacgctctacctcccagcccacacctccttctgttctcagccctgccttggcctggttagttctcaggagggtgctgtggatgcttgttggtgagtcatgcggcctgtgggctctttggcctgtcctgcagctgtattctttcaccttaggccactggaagggaacacctgcctctcccagatgcacagctgggctccgctgaaggtgctgcacaatgactccgacatcctcttccctgtcagtggcgtgggctcctacagcccagcaggtgggtgtctcccgattactcctttcctccaataagagctttggcttcgagaaccagcaggaatgtctgagttccctggacaggtaggaatgggagccgggaggcacgggagtcggggtgtggttcagggccagggggagctcactgagatgcagaagtgagagagggcttggcttctctccctgaacctgggtatcctgaggtgctctccgtggagtgagtgttgggctgaaccagctggcaagtcaccagggcctgcaggcctgtttttctcccttaccagtggcccgttgaacttggtcgtttaaaagctgaccacaaatagtgaccacgattttgcctctttggagatgcaagaaggtaactgaacccctgtctgtaaaggccctgccaccctgtgcagaaaagtgcttggggatcaggaagtagcttggttaaaagctgtttctgggctgggtgcgatatctcatgcctgtaatcccagcactttgtgaagccgaggcgggtggatcacctgaggtcaggagtttgagaccagcctggccaacatggtgaagccctgtctctactaaaaatacaaaaattagctgggtatggtggtgtgtgcctgtagtcccagctactcacgaggctgaggcaggagaattgcttgaacccgggaggtggaggttgcagtgagccgatatcgtggcactgtacaccaccctgtgtgacagtgagactctgtctcaaaataaataaataaataaataaataaataaataaataaataaataaatatgtctctggtatgggtaagcatttttgcaccattccacacggttgagcacgtgcccgtgtggtttgttattgttttctttagtgcaggtcatggggaggacgtgattgatcccagctggcctgtggggtgcagtgtaatgcagctggcacagcatctggctcagagaagtgcccagttgctgtccctgccctcagaacaccgctgggtcagagaagacttggcccaaccttcttaggcgcctcctcgttttcttaggaagtgaatgtgccttctctgggcccagatttaggaaattatgactggagcccactaatcactcaggaagctgttgaaattctgaactggggtgtagattcttcctgtcacttggcagggagcataaacctactcaaactagctgaagcacagaggcagggcggggacagtcactggcagcaggacggggccagtcagacgcagtactagctctagaaagttgagtaagcctgagtgcattactgctctgagcgtcagcattcctggctgttaaatgaggctgagtgcttcctgtctgtcagttgctgtgtcctcatctggaaaatggggatgacagtgacaatgagagccagcatttgcaaagccaaaggagccctgcactgcagtgtggctgaccctgatgaactcatctgctcttgagcacagtcctgtgagagtggggggtgtgattatatcagctacctttgagatccacagtgaaggcgccctgagttaatctggggaaggtgccaggcacatgccaaggccccttgtgagagcttcagggacatcttgtccatggcccaggagctggggcgttggcatggagggggctttcctgacttggtggggtgctgtcatctttcttatgtggcctccctccacttcctgatgggggtctgcccacctcttcttttcctagtccatctttttttttttttttttttttttgaggtggagtctcactctgtcacccaggctggagtgcaatggcatgatcttggctcactgcaacctccgccttctgggttcaagtgattgtcctgcctcagcttccagattagctgggattacaggcatgcaccaccatgcccggctaaattctttttgtatttttagtagagatggcgtttcgccatgttggccagactgatctcaaactcctgacctcacgtgatccacctccttggcctcccacagttgctgggattataggcatgagccaccgtgcccggccttttctagtccgtctttgctccctgttcattctcatgccctccttggcccacaccatgcctcagtcacatgaccttccataccaactggaatttctcatgggtctcagttgaggtcccctaaaagtgacaatctcgtaggcctagctcatgtttgcaggccaggccaccgaagtcctgcatttctagaccatccatggtccaaatagccaaaggttacggggttggtgaccttgctgatgcctgttcagcggcagtgtagatgcaggcaggtcatctgaggaggggcaggggctgggagagagcaggtggtcccaggatgtgtctaggacccctggggagttttgaatgtgtgttcacaggctctgtctcatgaatcaatttcctgctcaccttgtcccgttccccatggaggggtcttgtagttgggttcttgaattattgtggaaccgtgaggtgcttgcagtaggtggtctgattgttttggcagctcctttgccgcttagctgggccccctgaaccatcagacatccgggtcagctcctttgccgcttagctgggcctcctgaaccatcagacatccgggtctcctttttcgtgcatgttgggctttggtcttagagaacccagagctcttcctgctcttctgggctttctgtagcaagtgtgtccagggaacgtagctccccatcagcctctagagtccttgcagatttcctgtggtcccacacccggctgtcagctcgcagagtcagctccatcttctcactgctgatgggacccgagctccagctgatgtcgaatgcactctctggagatgacgtgtgccggcgtcagccagcatttcccttctctgcagtaacgatgctgtcagggggcttgtgagctgggacagcccaggggctgcgcacaggggcaggacatggcatagggagaaacattattccaggactgtgtcaggatgttggactcagagccaggggaatgggtagcctgattgggacgccaggttgcatcaagtcccttctgtcctgatgccccatttccatgggaggtgtggggccgactggtgccaagactctgcctgcctgcccaggtggccaccgccaccatttctcctgagactccattccttttgctctgtttctgccttttgtcccttctgagggacatcttccttccttagagatattctgacattccctctcattctggagccacttcgtcttttaatggagacttcccacatggagggctcctcaccttaggagacttttgtcatctttgaacacgctggtgcctttgcagtcactgccagtggggatagttagagaaggcaaaggcactggctgggagaggatgctttctgcagctgagtgttgggagggagaaaggagcaaagaagggggaaccctgaaaggagttctcttgaatcttggaagagataactctgtggtttagggaggagttttggagttgcttttcttgggtgacagagccattcacagaaggggacagcaccccaggttgcaagaggagaccccagacaagcaaatgaggactggggaccatgcgtggttcctctgggagtatgtggtgtctatacctgagcaaagcaaattcaccagcattgctttccagttgcaaggaagggagagctacccaggtttattttgagtgggaatagtaaacgggtgaaaaatcacctgtcagtacaaggtgatatgactgctcatcccttcattgagggtcctgtatttagtattgggttttaggaaatgcacaatttccaagggctttcttaggttcctttgaaaccttgggtcctcaaaccctttgtttccccatcaagtctaaagttctatttctccttgtcctcacgttggatcttggaagttgtttgttgaggttgaggacagactgtggtggctctgccataatctgatgtgattggttttagcacttagctcttagtgggcagttttactgttttggttgtcagtgttgcggtggctgggcggacactgccctggttgtgcttcccagtcagcttatacgggttgtgtgctctttggggttcctggttttctttattcagtcttcccactggatcactggatgcaggcctgtatgctaaagtgggtacaggctcagctctgccattggacggaccagggttcaaacctttgcacttgttagttctgtgatcttgaacaagttgcttaaattttcgggatccatttcctcatccgtaaaattagataatggtatctgtcttgggggccttaaggatgagacggtctatgctgtgtgcaccccagagcgtcaggcccacaacaagtacaagccattcgcggttgtgcatcgtgaaggggcccgtgggcaatcacctgggaccgtgtggacattgtatcctcactgagcgctctcattgaaggctgggtgggtccatgcctttgccccagctgtggatttccactctgcatgttgagtccctgtctttgcttcagggaatgtagtctgactctgcatgagttagattagcaaggatgacagggaactggggcgtctgctgtagaaggcctcttagatggtatggagcctttggaccacggggcagtggacacgacttgtgagccaagaggaggaggtcattttgggggcactgagcagtcttggatccccctggctctgtgatgggatggagggtgggtgccgtgctcttgtgagcttacagcctagtgcgacataagatggggttgtgagggtcaggatctgttggtaggcacagcggggtatcccagtagagctttctagaaggcagttagagatgtgggactgagattcaagacaggtctgggctagaggtgagggcttgagcgctgtcgtcttcacggaggtgagaactgtagccaagaccttgccagatgtgccgagggtgacagagggccttggggccatgattcagggccaccttcactcaggaatcagagaaaagatggtggggaggagggccggagattagtgttgggaaggttgagagaggggagcgccaagtaggaggggatggtggggtgggggctgagggaggggttccttgggccattccagttgaccaggtgggaggatgaatgcccgaggtagccaggatctgttatggggtgagttgatgccaccctcactgagcattctcattgagttttacatgcgttaagatgtaacattcgggagtctgaggcaggaggattgcttgaggccaggagtttgagactggtctgggcaacatagtgagaccgtgtctctaaaataaataaataaataaataaataaataaataaataaataagcaggccagtcatgagggtgcatgcctgcagtcctagctactcaggaggctgaggtgggaggctctcttgagtccaggagtttgaggctgcagtgagctataatcgtgccactgctctccagcctgggtgacaggaaaaccctgcctctaaaaaaagcgggaggggaagtggacttgaacttcttgagaatttggagtcagtaaataacttgatggagacagcaaggtagaagaaaaggttaaaacaattttttttttcctggtaagtttccctgaagttcagcccctacagagctgggggttcttggggcaccttgagtaagccaagcaaagatggagggaatggcatggaggatggatgaggaaggcaccgaggcgtgctctctccagcaccatgttccttgtccccgatgcacggctggttccatagtggtcattcactaataagtttctttttctttttctctttttgagacggagtctcactctgtctcccaggctggagtgcagtgacgtaatctcagctcactgcaacctccaccttctgggttcaagcaattcttccacctcagttttccaagtagctgggattacaggcgtgcactacctcgcacagctaatttttgtatttttagtagagacggggttttgccatgttagccaggctggtctcgaactcctgacctcaagtaatccacctgccttggcttcccaaagtggtgggattacaggcgtgagccaccgcgcctggcccaagaagtttcttgagtgagcaaggtttctcctgggtgatactggccttaatgtcaccatgcagcccaaggcttatggatttgcatgttttcctggaaggagacttgagcatttatgaaaattgttcaggtccctagcccgttagttccagagactacttatggccccagctcttgtgaatgcctttcctaaatgcacttaatgcagggaaaattggccttttagaaagccgcagacattgtcaggaattagaccatgctgccctctactgtctgattcgaggcactacaagcaggagcagttttgtcttaacagcaagctgattcattatacccggtttctggccctggttctgaatatggacttcatgcataattccaggtggctcaaggtcgaaaatgtcacaggccaggcacagttgctcacatctgtaatcccagcactttgggaggccagggcggaaggattgcttgagcccaggagtttgagaccagcctgggcaacatagtgggacccccatctctacaaaaaaaaataaaaaataaattagctcggcatggtggcacacacctgtagtccctcccaggtacttgagaggctgaggtgggaggaccactggagcctgggaggttgaagctgcagtgagccgtgatcacacaccaccactgcactccatctcagcctgggtgacacagtgagaccctgtctcaaaaaaaaaaaaaaaaaaaaagtcacaggnnnnnnnnnnnnnnnnnnnntcacaggttaaggggaagtatagggctttaaaaaaaaaatttttaatggagcttcgctcttgttgcccaggctggagtgcaatggcacgatctcggctcactgcaacctctacctccagggttcaagcgattctcctgcctcagcctcccgagtagttgggattacagtcgtgcaccaacacgcccagctaatttttgtatttttagtagagatggggtttcaccatgttggccaggccggtctcgaactcctgacctcaggtgatccacctcccaaagtgctgggattacaggagtgagccgccatgcccggccaagtatagggctttctgcttctacagtgactgatgccaagtctgagattatctctgaacaacaggaaacagctgattaaaatccagcttgcaggagagatggagaaaaatttcttagtcaagtgatgtagcagatgagccaatgtctgcattgtgtctttgtcttatggagaacatgtagtgagaaaagtgacctctttctgtgattgctctctctgcacagatgcccccctcggaagcctggagaacgggacaggaccagaggaccacgttctcccggatcctggacttcggtacaggttaatattgagaaacccagttgcctgtggcattaaaacatcctattcacagctgtgcattttattcttttttaaagataggagtgcacctgctaggattaaagggcaagggtttacttcacatttatgttcagatttagtctttttttttgagatggagcccggttctgttgcccaggctagagtgcagtggcgcagtctcggctcactgcaaactccgcctcccgagatcaagcgattctcttgcctgagcctcccaagtagttggaattacaggcacacaccaccatgcctagctgatttttttgtatttttagtggagatagggtttcaccacgttggccaggctggtctccaactcctgacctcaggtgatctgcccacctcggcctcccaaagtgctgggattactgatgtgagcagatttagtctttacatcacagaagatgcagttgccaagggtcttagatcattactgcctcagagagactgtataagagatggtagatgacgaatgtcaacaccttttggggcatatctgggtgcctcctctattgttattttctttttttctttttgagacagtctcgctgtgttgcccaggctggagtgcggtggcgcaatctcggctcaccgcaagctctgcctgctgtgttcacgccattctcctgcctcagcctcctgagtagctgggactacaggcgcccgccactgcgcccggctaactttttgtattttcagtagagatggggtttcaccgtggtctcgatctcctgacctcgtgatccgcccgcctcggcctcccaaagtgctgggattacaggccaccgtgcccggcctgttattttcttaatttaaatatttgttgatatttgataacaagatttgaccatcctagtgttgtatatttaagccatttagatattacatagtatttgtgaagtgcttagtatgctgtctggcatgtattaagcactatataggttttctttttgttttttcaaataaagtatctcaaggggaaattgagttctcccaagttgttggatgctttttttttattatttaagttttagggtacatgtgcacaatgttcaggttagttacatatgtatacatgtgccatgctggtgtgctgcacccattaactcgtcatttagcattagctatatctcctaatgctatccctcccccctccccccaccccacaacagtccccagagtgtgatgttccccttcctgtgtccatgtgttctcattgttcaattcctatctatgagtgagaacatgtggtgtttggttttttgtccttgcgatagtttaccgagaatgatgatttccagtttcatccatgtccctacaaaggacatgaactcatcattttttatggctgcatagtattccatggtgtatatgtgccacattttcttaatccagtctatctttgttggacattcgggttggttccaagtctttgctattgtgaatagtgccgcaataaacatatgtgtgcatgtgtctttatagcagcatgatttatagtcctttgggtatatacccagtaatgggatggctgggtcaaatggtatttctagttctagatccctgaggaatcgccacactgacttccacaatggttgaattagtttacagtcccaccaacagtgtaaaagtgttcctatttctccacatccagcaccttttgtttcctgactttttaatgattgccattctaactggtgtgagatggtatctcattgtggttttgatttgcatttctctgatggccagcgatgatgagcattttttcatgtgtcttttggctgcataaatgtcttcttttgagaagtgtctgttcatatcctttgcccactttttgatggggttgtttttttcttgtaaatttgtttgagttcattgtagattctggatattagccctttgtcagatgagtaggttgcgaaaattttctcccattctgtaggttgcctgttcactctgatggtagtttcttttgctgtgcagaagctctttagtttaattagatcccatttgtcaattttggcttttgttgccattgcttttggtgttttagacatgaagtccttgcccatgcctatgttctgaatggtaatgcctaggttttcttatagggtttttatggttttaggtctaacatgtaagtctttaatccatcttgaattaatttttgtataaggtgtaaggaagggatccagtttcagctttctacatatggctagccagttttcccagcaccatttattaaatagggaatcctttccccaatgcttgtttttctcaggtttgtcaaagatcagatagttgtaggtatgcggcattatttctgagggctctgttctgttccattgatctatatttctgttttggtaccagtaccatgctgttttggttactgtagccttgtagtatagtttgaagtcaggtagcgtgatgcctccagctttgttctttttggcttaggattgacttggcaatgcggcctcttttttggttccatatgaactttaaagtagtttttttccaatttgtgaagaaagtcattggtagcttgatggggatggcattgaatctataaattaccttgggcagtatggccattttcacgatattgattcttcctacccatgagcatggaatgttcttccattcgtttgtatactcttttatttcattgagcagtggtttgtagttctccttgaagaggtccttcacgtcccttgtaagttggattcgtaagtattttattctctttgaagcaattgtgaatgggagttcactcatgatttggctgtttgtctgtgattgttgtgtaagaatgcttgtgatttttgtacattgattttgtatcctgagactttgctgaagttgcttatcagcttaatgagattttgggctgagacaatggggttttctagatatacagtcacatcgtctgcaaacagggacaatttgacttcctcttttcctaattgaataccctttatttccttctcctgcctaattgccctggccaaaactttcaacactatgttgaataggagttgtgagagaaggcatccctgtcttgtgccagttttcaaagggaatgctttcagtttttgcccattcagtatgatattggctgtgggtttgtcatagatagctcttattattttgagatacgtcccatcaatacctaatttattgagagtttttagcatgaagcgttgttgaattttgtcaaaggccttttctgcatctactgagataatcatgtggtttttgtctttggttctgtttatatgctggattacatttattgatttgtgtatgttgaaccagcctttcatcccagggatgaagcccactcgatcatggtagataagctttttgatgtgctgctggattcggtttgccagtattttattgaggatttttgcatcaatgttcatcaaggatattggtctaaaattctcttttttggttgtgtctctgcccggctttggtatcaagatgatgctggcctcataaaatgagttagggaggattccctctttttctattgattggaatagtttcagaaggaatggtaccagttcctccttgtacctgtcgtagaattcggctgtgaatccatctggtcctggactctttttggttggtaagctattgattattgccacaatttcagatcctgttattggtctattcagagattcaacttcttcctggtttagtcttgggagagtgtatgtttcgaggaatttatccatttcttctagattttctagtttatttgcgtagaggtgtttgtagtatactctgatggtagtttgtatttctgtgggatcggtggtgatatcccctttatcattttttattgcgtctatttgattcttctctctttttttctttattagtcttgctaacggtctatcaattttgttgatcctttcaaaaaaccagctcctggattcattaattttttgaagggttttttgtgtctctatttccttcagttctgctctgattttagttatttcttgccttctgctagcttttgaatgtgtttgctcttgctttttttctagttcttttaattgtgatgttagggtgtgaattttggatctttcctgctttctcttgtgggcatttagtgctataaatttccctctacacactgcttcaaatgtgtcccagagattctggtatgttgtgtctttgttctcgttggtttcaaagaacatctttatttctgccttcatttcgttatgtacccagtagtcattcaggagcgggttgttcagtttccatgtagtggagcggttttgagtgagtttcttaatcctgagttctagtttgattgcactgtggtctgagagactgttataatttctgttcttttacatttgctgaggagagctttacttccaactatgtggtcaattttggaatagatgtggtgtggtgctgaaaaaaatatatattctgttgatttggggtggaaagttctgtagatgtctattagatctgcttggtgcagagctgagttcaattcctgggtatccttgttgactttctgtctcgttgatctgtctaatgttgacagtggggtgttaaagtctctcattattattgtgtgggagtctaagtctctttgtaggtcactcaggacttgctttatgaatctgggtgctcctgtattgggtgcatatatatttaggatagttagctcttcttgttgaattgatccctttaccattatgtaatggccttctttgtctcttttgatctttgttggtttaaagtctcttttatcagagactaggattgcaacccctgccttttttttgttttccatttgcttggtggctcttcctccatccttttattttgagcctatgtgtgtctctgcacgtgagatgggtttcctgaatacagcacactgatgggtcttgactctttatccaatttgccagtctgtgtcttttaattggagcatttagtccatttacatttaaagttaatattgttatgtgtgaatttgatcctgtcattatgatgttagctggttattttgcttgttagttgatgcagtttctttctagtctcgatggtctttacattttggcatgattttgcagtggctggtaccggttgtgcctttccatgtttagtgcctccttcaggagctcttttagggcaggcctggtggtgacaaaatctctcagcatttgcttgtctgtaaagtattttatttctccttcacttatgaagcttagtttggctggatatgaaattctgggttgaaaattctttaagaatgttgaatattggcccccactctcttctggcttgtaaagtttctgtcgagagatccactgttagtctgatgggcttccttttgtgggtaacccgacctttctctctggctgcccttaacattttttccttcatttcaactttggtgaatctgacaattatgtgtcttggagttgctcttctccaggagtatctttgtggcgttctctgtatttcctgaatctgaatgttggcctgccttgctagattggggacgttctcctggataatatcctgtagagtgttttccaacttggttccattctccccgtcactttcaggtacaccaatcagatgcagatttggtcttttcatatagtcccatatttcttggaggctttgtttgtttctttttattcttttttctctcaaattcccttctcacttcatttcattcatttcatcttccatcactgataccctttcttccagttgatcgcatcggctcctgaggcttctgcattcttcacctagttgtcgagccttggctttcagctccatcagctcctttaagcacttctctatattggttattctagttatacattcgtctaaattttttcaaagttttcaacttctttgcctttggtttgaatttcctcctgtagctcagagtagtttgatcatctgaagccttcttctctcaactcgtcaaagtcattctccgtccagctttgttccgttgctggtgaggaaccgtgttcctttggaggaggagaggtgctctgctttttagagtttgcagtttttctgctctgttttttccccatctttgtggtttcatctacttttggtctttgatgatggtgatgtacagatgggtttttggtgtggatgtcttttctgtttgttagttttccttctaacagacaggaccctcagctgcagtctgttggagtttgctagaggtccactccagaccctgtttgcctgggtatcagcagcggtgtctgcagaaccagggattttcgtgatccgcgaatgctgctgtctgatcgttcctctggaagttttgtctcagaggagtacccagccgtgtgaggtgtcagtctgcccctactgggggatgcctccgagttaggctgctcaggggtcaggggtcagggacccacttgaggaggcagtctgcccgttctcagatttccagctgcgtgctgggagaactactgctctcctcaaagctgtcagacagggacatttaagtctgcagaggttactgctgtctttttgtttgtctgtgccctgcccccagaggtggagcctacagaggcaggcaggcctccttgagctgtggtgagctccacccagttcgagcttcctggctgctttgtttacctaagggagcctgggcaatggtgggtgcccctccaccagcctcgctgccgccttgcagtttgatctcagactgctgtgctagcaatcagcgagactccatgggtgtaggaccctccgagccaggtgcgggatataatctcctcatgcgctgtttcctaagcccttcggaaaagcgcagtatttgggtgggagtggcccgatattccaggtgccgtctgtcacccctttccttgaacaggaaagggaactccctgaccccttgcgcttcccgagtgaggcaatgcctcaccctgctttggctggtgcatggtgcgctgcacccactgtctggcactccctagtgagatgaacccagtgcctcagatgcaaatgcagaaatcacccatcttctgcgtcactcacgctgggagctgtagactggagctgttcctattcggccatcttggctcctccctttttttttttttttttgagacagtcttactctgtcgcccaggctggagtgcagtggcaccatcttggctcactgcaacatccgcctcctgggttcaagtgattctcctgcctcagcctcccaagtacctgggattacacatgtccaccaccatgcccggctaatttttgtatttttcagtagagacggagtttcgccatgttggctaggctggtctcgacctcctgacctcatgtgatccgcctgccttggcctcccaaagtgctgggattccaggcgtgagccaccacgcccagcctggtcataacatttttatgtagcctgggtgacaaagcgagaccctggatgcttggtggcagaaccgaaatggacaccaaagtcttatgccactgccatccttgctgctattaccgttttcttcttctgtctctcctcttggctgtaatttggggtcccagggtgctattacatccttattttcaaacctagctctagagtggaacttcctgactaccgtaaaccatattagatgccatggtcttacctggaacagtcaagggttctgctctctcaaaatgacattgcttgtaggaagcttgtcccagttagttcagtgtcagaaggaattggtgttgccagacccttccagggggtggagtctttttttgctatttattttagaaaatgtgactaggcatggtggcccatgcctgtaatctcagcactttgggaggccaaggtgggaggattacttgaggccgggagttcaacaccaccagtctgggcaagtgagaccctgtctttacaaataaaacaacaacaaaaattatccagatgtggtggtgcatgcctgtagtgtcagctacttgggagactgatgtgggaagatcacttgaacccaggagttcaagccttcagcgagctgagattgcaccactgcactccagcctagttaacggagtgagaacctgtcttaaaaaaaaaaaaattggaaaatgcaacagtaaatgaaaaaagaaaatcagtcttaaccctcaacttcattatgttgttgatgttttggtacttttcctcctagtcatggtgtgtgtgtgtgtgtgtgtgtgtgtgtgtgtgtgtgtgtgtatctctgttaaccatgtgatgaccgtgctgttctcaccaaagacactaaactttatttttcatgttgtaaattatttgtaaacatacagttgattcttattattcccagtagttgtattctataaagttgctatgaagactgaaccagtgctcctaggggaagtacatggttaagttgctttgaggctctggtcacacattttgtttttgagatgaactgttgctcttttgcccggggctggagtgcagtggcgtgatcttggctcactgcaacctctgtttcctgggttgaagtgattctcctgcctcagcctcccaagtagctgggattacaggcatgtgctaccacacccagataatttttgtatttttagtagagaaggggttttgccatgttcgccaggctggtctcgaactcctgacctcatgtgatccacccgcctcggcctcccaaagtattgcgattacaggcatgagccaccacacctggcctggtcacagcatttttatcaactgatcaacacataacctggttttatgtctgttcctgtttaaagacaccttgtttaatgtatgcagttgattcattaacattgaattcacagccagcagcactgtaagccatgcctgaatgaagcatctctaactcacaaattatctccatacggcacatcacagccttcctgtgcttaggaactgtcggcagtaccacttcagcactgtgcttggggacattttaaacaataaaatcaagtggaaaaaaaggccgggtgtggtgggtcatgcctgtaatcccagcactttgggaggctgaggcaggtggatcacttgaggtcaggactttgagaccagtctggccaacttggcgaaaccccatttctagtaaaaatacaagaattagtcgggtgtggtggtgcgggcctgtaatcccagctacttgggaggctgaggcacaagaatcgcttgaacccaggaggtggaggttacagtgagccgagatcacgcaaaagaaagaaaagtggaaaaaaaaatgctaaaaacatggcagtaaatagacagcaaagaggatgcttgtttacggtgtgagatctgaggtcccagctgttcgacttcagctgagattatgcacattagggagtgaaattattggcctctgcacgtgttcatgaatgattgtgaaagcacctcaagtattgactttggggttacaaataaattttagtgcgtagatgaatttccaaatacggaatctgcagataacgaggcctgactaatttccaatgactgcctctatcccttctagtagaggtaccggagtaaaccgacctctgctagtttttggaatggtgagggtgtgtactttcagtggccgagtgtaacttcctcctgcctgctttttcctagtgtggaagccagctctccaggccacggaagtcctctgagcagcctgttaccttctgcctcagtgccagagtccatgacaattagtaagtactttcgcagccccctccaccagctctgggatgacttctggcccacgtctcatggcggtgcctttgtgcttctaaccctgtgactgtgggttcacgtcaggtgtgtacgtccctggttgtagactggaggtgtggtacgtgcttgtggatatccagaaccgtggttaatgcgtggcgcttgggcgtgtgcgcgctaaagggcgtgcctcaggatggagcagccttgccgtagacttctgtggttccaggttttggggtttgcctcccataatgcagttagctacagaggacctattctagttggatttcctttgtaactctgaaggactcatttttgtaagtgaagaagaatatgtctctccaagatgattaaactttgctaatgatcaggcttcaactgtttccaactttactacctagaaaaagtattagagatatagcaaggaagactaggtttgaatggctttgtataacaaagaataaaccaactgttatgtaaactgacgggtgctcctggtatctcactggtggcttgagccagcatttgtcccatggcctcccctggaggcagagggggcacttgttcccaattaaaaaaaaaaattagcttttgttgctaaggaaggaagaaggcgtttgggaggcacctagcattttctgattcaagggtgaagcaggaagtgagcagacactatgtaaaccaacagttggtttattttttgtacacaaagccattcagacctactcttcttgaagttccggtggttaaggagatgtgatggaaatttctctctatccagaggtagatgggctggggctggtatgtggctccacggccatcagagaccgggactcctcctgtcttgccttgtagaccaaaatagccattttagctccagccatttcattctcattccaggcggcaggaaggaggagagagcagagagacttcgtctatttctacatataggattcaggggcctgagcttggatagggaaaaaaattacaatgtttttcatttagctctgggtgaaatatagtattttcttcaatcatgatcattctattttgatgtaattggtttcctttgtgatatggtatgttttatatattttaatacattttcctgaataggagcccatggttattcctagattacaaaatgggctcttggtacaaaaacgttgaagctcccccgaccttcactagaaggtgcttacagtataccactcgtgtcttgggccagcattcatgtcatggtcccccttggctgcagagggggcaattgttcttgataaaaaggaaattagtttttgttgctaaggaaggaagaaagagtttgggaggcacccagcattctttgattcaagggtgaagcaggaagtgagcagacaccgtaaggctgctgcgtgggaacggctggccgcactttttgtatgtgagcatgtgtggtttactgtggcgctgctcagccctgaactccgctgagcaggtgttaatagatcactcagtccatgggacacagggtgggtgagtatgtagctggctgcttttcacctgtcaatcttttgtttaccacagtactgttacttaccctatagtttactttattattcatttttatttatttatttttttgtagagttgaggtctcaccatgctgtccaggctggtcttgaactcctaggatcaagcgatccacccgcctcagccttccaaagcgctgggatgacaggcgtgagccaccgtgcccggcctactacagtttactattttttttttttttgagacagagtcttgctcttgtctcccaggctggagtgcaatggcacgatctcagcttactgcaacctccacctcctgggttcaagcgattctcctgcgtcagcctcccaagtagctgggattacaggcccacgcccggctaatttttgtatttttagtagagatggggtttcgccatgttggccgggctggtcttgaactcctgacctcatgatctgccggtctcagcctcccaaagtgctgggattacaggtgtgagccaccgtgcccagactgtagtttacttttaatgatgcacttaaacaaattgaattcctttattttttgaaaaaggaagctttatctcactactgtaaatggagagtcactatgagttaacgaaaccagcaggtcgctgtaaaatgaagacagtggaaggaaactattactaagtgtgcctggcgtggttgcctgccctgggttccgattgatacccactcttgttgttcaaaagagagatgagtgctgcttctttttggccccggcctgtggcaagtatctcagtcttcatactgctgggaagctctgtaaccaccagcaagaccagaagtggggtgatcagcagtgcaggaaagcccatttgggtgcagtccccgcacctagcccttttggaagtgcttctccaaaagggaattgtgccggaaaagtagggattgaaaccaaacagccacatcctgccatcaggatgctctttatggccccactgaccaagaaatcacagcttctgtactcagtgatgactgcttgacttcagttgaggacaacaatgaagttctgtagccaggcgtggtggcagatgtctgtaatcccagctactcgggaggctgaggcaagagaattgcttaaaccccgggaggtggaggttgcagtgagccgagatggcgacactgcactccagcctgggtgccagagcgagactctttgtctcaaaaaaaaaaaaaaaaaaaaagaaaagaaaagaaaagaaaaaaaaagctaaaataaaaatttcggggaaaaaaatttagggataaaaccttggtgaagttctgattgctggatttggtcacaaagatcatgctgttggtgacatccctggggtccgagttaaggttctcagagtagtcagtgtagctctcccttggtcctatgcaaaggcaagaaggaaagaccaagataatacattttggtggtgaaaacacagtagaaatatatttttataagccaaaggcaaagagatgtgtcagcgagtcacattaggtgttgaggctatcctgttactgaactgatggtaatggagaggactgaggatgagaaaagaagccactcctgtgacttgctgggatctaacgccacatcgcttcccagcacctatgattctgtctctgtgtgggtggcaccgtggtgtagatggacaagacttgactctggctgtgaggcacagctactgtaaagaacactgcgttttgatttatgggcattttttttttttaaaggacagcagccccgagatcatgcctgcgagcctttgtaggcaccgtaagtagggctgcaggcatccctgtgtgccctggcaggtgtctgacattctgtttcccaagagttcctgcggccggggctgaggtcccagcatctcagataaacacggtttgctttgtcagctgcgtctcaggtccacatagagcatggtgtctgggccttcctcagccgctttctgtctttgaggaagtcactggccttgcctgtgcattttcagtgatgacatacatgcccttaaacatgctcgagttaggccagtgacagaggcgtagattgtttttcttgttttgactcagacaattttttagaaactatatcattttattatttggcattttgagcaagtttgggacatatccagagcttataccttgaatctctgaagaaaaaaatgtcaccatgtctgcatttgagccttgatacttggtagaaacgtggtctgtggttaggattgtgtgtgggtggctgggacaaggggcttctgtcttctgcggtgcctgtacctttaggagtcttcaaggacagtgctgttgtctaccctggatgtcatccagcacagatgaggggtcaggaatcctagaaattttgagcgaagggtggttttcacttgtgttttcccaccctgccatcacctcctgtgtcacatgcaagaggagtaagaagagtgggtctgtctgggtgtccggggtatttgcttgggctaccataacaaggggccacagatagggtggcttcaacaacaaaaacttattttctcggccgggcacggtggctcatgcctgtaatcctagcactttgggaggccgaggtggggggaatcacttgaggtcaggagttcaaaaccagcctggccaacatggtgaaaccctgtctctactaaaaatacaaaaaattagcatggtgtggtggctggcacctgtaatctcggctactcgggatgcagaggcaggagaatcgcttgaacctgggaggcaaaggctgcagtgagctgagattgcaccactgcactccagcctgggcgacagagcaagactatgtctcaaaaaaaaaaaaaacccctcaaaacttattttcttacagttctggaggctgaaagaccaagatcaaggtgccagcagggttgatttctggtaaggcctctttccttggcttgcagacagccaccttctctctgtccttatgtggcctttcctctgcaggcacatcctggtgtcccttatctcttcttataagggcaccggtcctgtgggatcagagccccatgcttatgaccttattaactttgattacctcattaaggccttgtctccatataaactccgattgggagttaggtcttccactggttcattagggaagggatgcaattcagtccatagcatgagttgtcccaggagtgagtgtcgcaaatgccgtcccagttcagatggagcatcccattgctgcatgtgaagcacctgagattctcctctagagcagtcactggactcttggaaaccccagaggagcttggcaaagaaactcatcagctctgccccacaaagcagcgaatgcttcactcacatcccgccaagtggcttccctggcttcgtgtaataatctgtgcaggtggctgcctctgtactgtaattgagctagagctaggtaatttaatcctcagtgcctgcggataattgtgaagtcttctatcgagcaacctttccctctcaggtatctctgaaattgcaaagggtgttttgtcctgaggcattcagagggactgtattcttgtggttatttactactgaagagaagatggtgtatccagacccacatgattgttctcctactgcaaggccctctggtacttcagaaaatacaaaagcctgttatgaaaaagttaatttttttttttttgagacggagtgttgctcttatcgcccaggctggagtgcagtggcacgatctcgggtcactgaaacctccgcctcccggattcaggctattctcctgcctcagcctcatgagtagctgggattacagatgcccgccaccacacccagctaatttttgtacttttagtagaggcagggtttcaccatgttggccaggctggtctcgaactcctgaccttgtgatccgcccacctcggctttccaaagtgaaaaagttaattatttagcaaagcagtaaagacagtttggagcaaactaaaacacccataattctgcctcagggatgccttgcatttctgcaggtaggttcccagttcttgtttcgggcacacggagctgtacctggggttggagttgcagctgtgcctgttgctctcgggaggccatgtgccctcagggccgggagggcacactcggaagctcagctgcctgggctcaggttccagctgagtggccccagccccctcagtaccgtgtccttatcaagatagagtgacaggatcaacacccaaatcatgggcggccatgaagataactgtgatgtgcttagaacagcatcaggatcagagttaagagtcaataaataggccgggtgcagtggcgcacacctgtaatcccagcactttgggaggccaaggtgggcagatcacttgagggcaggagtttgagactagccaggccaacatagtgagactctgtctctataaaaaataaaaaaaattacctggatatggtggtgcgtacctgtattcccagctaattgggaggctgaggcaggaggattctttgagcccaggaggtcaaggctgcagtgagttatgattacaccactgcactccagcctgggtgacagggctagacccgtctcaaaaagaaaaagaaaaaaaaaagaaatccccagggcagtgagtgtcttctgtcccctctgggccctttccccttgtctgaagtcacccgcatggccagtggctttgcttttctgcctcctcttctgtcagctcttaccaccagttcctgacaaaccctcaaagcaaacttctggaatgctatgggcttgttaagaacacagcaggtccgaggagagtggcatttgatttgttttggaggccccatattccttctccactcttcttccctttccttttggacggcgtctcgctctgttggccaggctggaatgcactggtgtaatctcggctcactgcaacctccgcctcccaggttcaagtgattctactgcctctgccttcggagtagctgggattaaaggcacgcaccaccacgcccagctaatttttgtatttttagtagaggtggggttttgccatgttggctaggctggtctcaaactcctgacttcaggtgatcctcctgcctcggcctcccaaagtggtgggattataggcgtgagccaccgtgcccagcccccaccctacttctctaataaaatgtgtctgtttattattctagttctgactagaataataatcttctatcaaaatagaagctagtaaaagtaacagtatattctggtaaaactgactgtatgccatgtatggtgctgaagcatttttatttatgttttctcattgaatcccccagcagccttctgaggtgtaggttatattattctcttttgtataagaaaatgaggcttaggagggtaagtacctgcccaaggcctcatggctagtagaacagatagttactgagcacctactgtgtgccagacatggtgtctagctatagtaagtggtgaatctgtgagagacccaggtgttcttactccaaaacctacactcttgccaattctttttttttttttttttttgagatggagtctcgctctggctggagggcagtggcgtgatctcggctcactgcaagctccgcctcccgggctcacgccattctcctgcctcagcctcccaagtagctgggactacaggcgcccgccaccacgcctggctaattttttgtaatttttagtagagacgggatttcactgtgttagccaggatggtctcaatctcctttccttgtgatctgcccgcctcggcgtctcaaagtgttgggattacaggcgtgagccaccgcgcctggccacgctcttgccaattctacattacctaaggagacacgtttcattgtcaccagccagggcaagcagcagtggactagtcatatgtaggcatccaggtctgagagccttaagcttatcattactatttttggaggcagggtctctgttgcccaggctggagtgcagtggtgcattcctggcttactgcagccttgaactcctgggcttaagcgatcctcctgcctcagcttcccaagtagctgggactgaaggtgcatgccaccccgcccggctgtgttttaatgcttattttgtagagatgggagtcttgctatgttgcctaggctggtcttgaactcctggtctcagataatcctcccgcctcagcctctcaaagtgcgggggttacgacatgacctactatgcctggccaaacaccaaattttaaaatgaagaaaaattttctttttaccagtttaatttaactattgtcatttttaaaaaacttaatttgcggcaacaatgtttcaataaaattttggattaaatagtcccatgggtcccaatctgggggaccaggaggtacaaatagaagatgcgggtgagagagaaacattgtgaaccagagtaatggaggctgacacagatgcagagcagttgggtctttctggaatagcacgtgtctctgcctttggctgcgatatttcagctctgttattggcaggctttaataacaagcagggtaaccatcataacacttaaaactgatagacaaatgtggttcatgagtgtggaatgagaggcattcttggtggtaagtaatgattacggggccgggcatggtggctcatgtctgtaatctcagcactgtgggaggctgaggtgggtagatcacctgaggtcaagagtttgagaccagcctggccaacatagtgaaacccatctctactaaacatacagaaaacaattagctgggtatggtggtgggtgcctgtaatcccagctactcaggaggctgaggcaggagaatcgcttggaggcaggagaatcgcttgaacccaggaggcggaggttgcaatgagccgagatcgtgccactgcactccagcctgggcaacagagtgagactctatctcaaaataaacagattaataaagtaaataaaaattagctggtcatggtggcacatgtctgtggactcagcttcttgggagaatgaggcaggaggattgcttgagcccaggagttcgaggctgcattgagcagtgatcatgacactgtaccccagcctgggcaacagagcaagacctgcctcttaaacatttaaggtaatgattagtactcattagatggtaaagcagccgtcattatgcgagatgcctctctgaagttatcctgggctttacagcaacccagaaggtacaggcattactggtccattgtacagatgagaaagtcactgaggcagaggccaaatacagtgctcagagtcacacagccaaacttctggggctgcagcttccatatccagctgtatcctctttccctcttcctcctggttgacgtggctgggaagcagcagtgttttgtgttcgataggctaagctggcaacctgattcctgctggtggagctgctgccgcctctgcaatacgcttttgaaggaggacctgttgggcagtgggtcctcatggctagaccctgtgcagggggccatggtcctttggggggtatgagcactgccctgtctcgttctggctttgcttgtgtctctaggctaggctgcatgactgggaaggatgggtgctctccacacaggtcctgccgtgggtgtctgaggctgcagggcaccagctcagtctctgcagcaggcctcacagtgtcactgtttgggccaggcagaaagctagagagagacaggagaggcaggaacagatctggtcagctgatccagcacctgcagaaggctgcagcgggaccggctctgcggggtcagagcaggggcgggtgttgggtgggtgttttcatgttgctagggggaggtgccacgttgccaggtgtcccttgtaagctctgcagggtgcttttaggacatgggtgctgacttgtgctgtttgacagacatagactctgttcccacttgttcttatacttagaaaggatttttagctatccctccccagccctcatttatatgggaaggcttggctcagggagcgtaaggacattgtggtcatgctatgtgaaaatggcagaggaatggcgtttcgagtgttgacaggagtgcttttctttttgaagaaaaaagagagatttctttctttgtattttcttctgttcttttactgtttgctggatccctttttccattcaaacacaatttatggccggggcagtggcgcacgcctgtaatcccagcactttgggaggctgaggtgggaagatggctcgaatgcaggagttcaagaccagcctgggcaacatagcaagacccttcctctacaaataaaaacatttaaaaattggccaggtgcagtggcccatgcctataatcccagcactttgggaggctgaggcgggcggattactcttgaggtcaggagttcgagaccagcctggccaacacagcgaaaccccatctctactgacagtacaaaaattagctgggcatagtggtgggcacctgtggtcccaggtactagggggctgaggcagagaattgcttaaacctgggaggcagaggctacagtgagccaagatcataccactgcattacagcctaggaggcagagtgagactttgtctcaaaaagaaagaaagaaagagaggagagagagagagagagaaaagagagagagagagagaaaagagaaagagaaagaaagaaagaaagaaaaagtgtgtggtggtggcacctggcatctgcctgtagttccagctacttgggaggctgaggtgggaagattgttcgagcctaggaggtcgaggctttagtgaataatgattatgaccctgcactccagcctgggtgacagagcaagaccgtctcaaaaaataaaataaaaaaattaaaaaaacccaatagaaaaaaacctgcaactatttctgcccagtgtccatagtataatatgatcgccacactgctactcttggtttatatactgatgaacaagaagcaaaggtcctgccctcagaagctgtcagaactgtggggaagacaagcagcaagcattagaaaggcaaagcctatgccctgttttaaggcatgtttcaggaaagggcttctctcagatgtcagcggggctgaggtctcaggatggggggtttggcctgttttggtggcgggtggtaccgctggcattgcgctgccagaagtgagggggagagtgagttggaggatgctggagagggtggctcgtgtagattttatcccacgtacaatgggaagccagtggaggacttgaagcaggggcgataggatttactcacttcctcttgcgaagagcaggctctgaagcctgcttgccacgcagagcacactcagcagtgcgttccttccgtccttcactgctccttccctccgccctcccttgtacaggcagtgctgagggctcccctgtgtctcggggtagggagtcctgagttgacttagcggccatactctcaggctgctgacagtcctgtcactgccctaagcacggtgccctaacacccgtgagtcatagagctgtgctaggtgcagcaggagagacgcgtcccagcggggagttctggagccaggatgcggggtggggcggtgcgcgggccggtatcagagtcctggcttccagcctcagctccaccacttcctaactagatttctctttcttttttccttaaagactctctggtcccctgtcctcatttgtgaaatgaggacattctcaccggcgtctcaggggtgttctgaggtccaaacgtactagcttagtaaggcattagacttgagtgtggaaccgggcatcctttgtgattggagccttctcagctacctggaagcttttacggtggggagcggcggggctctagttcttccgggttaggactttgcgcaggaatgcagaggcagtgggagggaatgggggtaaatgttccgtgccgcctcacgcggttattgatggtaggtggtggcgttgctccagggaggccagttcctcttgaagtcacatctggagacccccttgggaccaatttttaagcccatttggtagctccccaagggttcaagtgccagctccaaaccctagtcccggggtttagggtttgaattctaggatgctgcctggtttcccatttccatcctggtttctctccagatggcctctgccagtcttcacatatcaaatccatccgtaagttcattcctatttctggggcaattctagattttccttcaaagagtgcctggaaggccaggtatggaggctcacacctgtaatcccagcactttgggaggctgaagcaggcagatcaatcacctgaggccaggagttcaagaccagcctggccaacatggtgaaaccctgtctctactaaaaatacaaaaattagccaggtgtggtggtgcatgcctgtaatcccagctactcgagaggctgaggcaggagaatcacttgaacccaggaagtggaggtcgcagtgagacaagatcacaccactgcactccagcgtgggcgacagagtgagacttcatctcaaaaaaaaaaaaaaaaaaaaaaaagaaagaaaaagaaaaaagagcgcctggaaaatagtaataatacaaatactttcttattcattttacctaccataaaccaggctttaccttcactaatgcttaatcttcatagcatccgtgtaaaataggagtgctagacttgttctgtagttgaagaaactgagaggctttgctgaaggtcatactgctattgggtggtggaggcagggttcacacccgctccccctccttgccgttcctggagacccacaagcttgtgtaatgccccaccttcagagaaaagcacccaggtctcaggatgtcccctttgctatagactgaatgtttgtgtgcccctaaaattcctaggttggaatcctaacccccagtgtgatggtgttaggaggtgggcgtttgggagttgattaggtcatgaggctggagccctcatgagtgggattagtgcccttaaaaaagggaccccagaggttgggtatcatggcttatgcctgcaatcccagcactttgggaggctgaggcaggaggattgcttgatcccagaactcgagaccagcctgagtagcacagatagaccctgtctctacacacacacaaaaattagacttggtggtgcgtgcctgttgtcccagctacttggaagtgagcccactttgaggtgagcccaggagtttgaggctgcggtgagccaagatcatgctactgcactccagcctgggcaacagagcaagatccttctcaaaaaaaaaaaaaaaaaagggaccccagagaccttgtttaccctttctgccatgtaatgatgacacagcaagaaggcgccatcagtgaaccaagaagaggaccctcaccagatcccgaatctgtcggtgccttgatcttggacttccagctgccagaactgtgagaaaatcagtccctgtcgttcacagtgcaccgggtccatggtgttttgttttcgcagccctactcggcggaggtgctcctgcaagaggccctctttccctggccgtccatctagaagagcgcagcacaggcaatctcatcccatccccccaagtgcagcacttccctggctgctgacttcaggtttcagagccccctgtaacctcactcccctctttagtttctttcctgtagcccccactgggatacaagctccctgagtagacacactttgtctgctagttaattgccattttcctcctcccccaaatcctgcctgacaagtagttgttcaagagacatttaaagaaggaaggaaggaaggaaggaacaaaggaactaatgtttattttagttctaacaagcatggagagttaaaagtgcattctgcaggaatgaattgaaaccgagttcccagagggcgggctccagtctgttataatcaccattgtgtctctatctcgggatgcagtaaaggcctggtaatatgagttgctcaagggagtggattttcaccttttttcctcttgtgtcagggagaggcagctggttgtagtggaatgatgcattacaaactatttgctctcagtgaatgggaacacttggttttgatcctggctctgagagtagtaggtcgcttgacctctctgtgcctcagtttcgcaagctatgaagtggaggaggcttccctcaaggattctttgtggtgctgaccatctgttctgggaaaggagccagaatatccacattctcatttgcggtgattaaagaaccactctgctgaagtttctcatgacttgcctgacctcgttagtttctttgataccaaagacaggtgtcttcctttcccccttgcctactgtctcctttacacatgtggtgacattcaggtgaatttgaatggcttttggctaggcaagccagtatcagtaaacacactggcttggacatttggcccataactttttatacccgaggccaggtgttggccgatgtgggaagagggctggaaagaggcagaatggtatttgtgtgagtgccagacccctgtggactgttttgctgagatgctgtcttatggagtttgtagaggtgaatcaacaactgtctttgtgaaaggcaaatgtcaccttcaggttttaattctgagtggccagcagcccttacattgccactgtatatcatcagagccactagaatattagatatgtaaatcctttctgcactttacacatcctttagttttgtagggccctgatgtcagtgatcacggcaagttgagaagcaatgtgttgggatggaaagaacatgggtcaggcagaccacagcactgctgttcaagagctgtgtggctacgtgcagtggttcctggctgtaatcccaacactttgggaggacaaggcaggaggattgcttgaggccaggagttcaaaaccagcctgggcaacatagtgagaccccctctctttacaaaagaagaagacagaaaagccagacatggtggcacgtgcctgtaatcccagctactcggaaggttgaggcaggaggatctcttgaacccaggagttgtaggctactgtgagccttgatcgcaccacagcctgggtgacagagtgagaccgtgtcttaaagagaaagatctatgtgaccccgggcaaatgctttaatttctctgaactcgttttcccagtccttgaaatggtggtaatattatccccttggtggattcctgggagttatatgaagtgtctgttgtatctgggaacctcattggaggctcatagatagttttagagatttcagatacctcttgcaattgtgtgcaaaatcgtgcttgtgtgtttgtgcacatacgtggattttcctggggagaagttcctttgctttcacgactctccttcagagtgttccaggctttagaaaaaagtaagaaacacgaaacacttcaggtagttagcaggtggtaattgcacatagtgtctggggcaacactggcaatcgtggtatcattatttttgtttttactgttctgcttgctgatgttaaaccagctacactggctgtgttcttacgcacatccctacatgtattagcagtgggaacctgggcaagttatttaagctaactgtgcctcagcgttctcgtctataaaatggggctatcatagtacccctctgacacagttgtgaggattaaatgaactaacagatggaagatactcagaagatacactatgtaaattaccacctgagctatcgaagggtgttatatgctatgtaaattataccttgataagaaaaattggaaaaaaaatccaagagagtatctggcatcttaaagactgaataactggtaggtgtgatcattaacaacaccctcaaagggtacgttgctgacgaatcttcctgaaaacaacatctgggccttattgttgaactgcaaataggttgacctgattttccatcttactgaaaccatccctcctgcagaggccctgaagttccctttagctggtatctacccctcaatcctccctctggttaagaggacataaaccaggctactctttctatgaggcctgaaaattggaagtgatcacgcaggatggtggttcttagctgggggtgattgcaacccccaggggacatttagccatgtctgggacatatatggttgtcacacctgggatgagggtccttccggcatctgctaagtagagcccagggatgctgctgaacgtcctgtggtggacaggacaggtcctcccaacaggacagctcctcccaacacagcattatctagtcccaaacgacagtacttgagaaaccccaagacagaaggaagcagcagggccgttttccaggaaccgtattttgtcttaggctttttttttaaaacctctcgcctcctgcataggtcaaggaatgaaacttaggaaaaaatgagcctaaagaaaatgatagatcccagggagcatttgtttgtgtgtgtgcgcatgcatgtgtgtgtgtatgtttgggagctttttcgtgccatcactcctgcaatgaagatgatgatttaggaaggcagtagatgcataatgatacagacctgtggaatgcaccagactaagtgatcctgactccgtagctgcggaagtaccgtcactgctgcggaaaccagctcactggtactactttactagatcttaatcaaaattcattcagttgatatttgttggtgtttacaacagccttgtctcccttcacctcctttttaacaacaaagtttctactcttgagttaatttcgtttgaatatatggttatttgggagctggaggttgcaagaaagcggctcaggctttattcctgccaatttcaggaagagccacattggagccaccagggggcgccctagtcttttctctgccgctttccttccgcagctgcgggtggtggttatctgaatttttcatgtccagcgcggtacccctttcagtggtgaggtcgcgagtggtggtggtgttgagagcagtggtcttttctagttgaaaaacatcaagcatgcatgcagctttctgttcaccatcagtatagcacagtcatgcattgccagtcactttgtggtcctgttctaaaagggaatttgcagctcatcagaaaacatttcccctgtgtcattgcttttcatgagatataattgattagctgtgggtattcagcttttgaatcccgattgttgccttcttgcccctttttttggggctggggagtgaaggtgatagagtcaggtgagcccagaccatccggcccatttgtttccttttaatttgttagagcttttgattgtgagccagggcagagagggcaagaaaaacatccttacttgtcaataggctgtgttgagggggtccttttttttcctcttggctattattggaagagattctcaacgctagtgaggcgttctggctcatcgcctagcaacacaattccaaacattcggcagctccagaaatgaagttgaggagtgctgtagtaacatcagagagagatgcgaggccccgcagccagctgcttgcttggctaagggcttcatgataaaattttaggatgagatggtggggcagtggccgttaaatcggctgcagtctgagccccctgccccttaactgccgagaagtgaacctaggtgacgtggccaacacagatccctcacgctgggcatctttctttaaaggggaaacttcccactgaattttgtgtattagcccttcagtgactgtcttagtgtcttagtaattggaaggttccagatggcatttagacatgcctcacttctttatcatctgtttattcattcaccaaacatttaccaaacatctctcatgtgctgggcgcagttctaggtgctgaggagccagaggtggggatccagcttggccatgcacaagctctgtgtcacatgttaaaatttccccatcattataatgcagatttaagagtgccagcaccatgggctgttgtgaggactaaatgagttcatacacagagagtgctttgacattgcgctcagcactcaggagatgttagctcttctcacatgggccctgcccacagagcattctagtggagttttatggtaataaagaaatgatgaatgattggatggggcaaaacgggaggcaatggggtcatgtgggagtgatgtactctttgttatctgtggcactgaacaaccgccactcgatccacccatgggaacgagttccccgtgaagtgggaaattcctaatggaagttttaggttatgcagtacagctcccaactccttacctggaaaaagaccagtgctggatgctggtcactcatatagaccctggattccttgctcccaggaggggaaggaggaaccgatgacagcaggatgaatgtagcaaggatagggtggctgaggtccagagggtcacaggagggaaaggttaagggctcggtgcaggggaggtcaggaggtcttgcacagatggggatgctgggccagaagggaacctccctgcagtgtgcaaagggggctgacagtgatcttccaggctgcacctctggttccgtcactaagcactgcaggatgtcgggatgggcttgaggagctgttgtcgccattatgaagcccttgaggaagcattggtgatggtgctgccgagtactgagtctgtccttgtcacccgttaactcacgcatgtctgcgatcctgtgagagcttgcggtgatccccatttcacagaggagacgggagtgcttagcggtagataaacctagccagcatcacacagccagtggccggtggagctgggttgcacagctaggctcttactccgggaagaatatgttttagcttcacctggagaccctgcaccaagccagagggcattttgaaggggctgtatttcaggccgacttcccgcatctggctggttgttccctgcctcaccaggctctcacttgtctgtggttaatgatccaggctgcagtgagtacacaaggtctcagtatcatttctgtgctcttggtttgggccacacatgatttttttttttggtcttttttagcatttgttcattttatttgaggtctgctgcattcctcctgacctccctaacagctcagactcttaatttgtttacagactttcaggaagggctgtccctgaactctaagctaggatcaacttttggtctggaggtttctagccggctatctcagctgggccaggcagcagcttatgtaaccgtttgatgcaattcagagccaatccaaaatgggcctctcgctcaggggatgagacgcggtcagacttgtttgaaatgtcagctttgtttgagctgggacagctcagtttgtaaagttggaaggcgggggtggtggggaggcagctgggtgtgagtttattgggaaggagtagcctgactgggctgcttcattaaagttgggggagctgcaccgccctggaggagagcaccccaggctcctgcagtcccacatgaagggctcacgtcctggctttgccatttactttgtccgtttccttatttccaaaaggaggtgaatagcacttgccatgtgcagtgcccgcacacgctgggcccagaggacgctcagtacgtggccggggtgcttacgttttggttgcagcccagcagttctaacccttcccctgccccctccttcaactccttttcctcctcctcttctccctcctgccctagaccttaaatattaatgttaaaaatttgtatttaaatttttgttttgcataagtatatatttacatggaacaaaactcaaaaggtacgtatgggataccgtaaaggatttctcttccactcccacatcagccaccttgctccccgtccaggactctaaccattggagttcaccttctggaagaacgtcgctgcccagttgaatagggggttgggcatactggagctcccacttgcagtggccaccgcgtgccctttgatgggacgttacattgcatttcagcagcacccagctgcttccaggtgtctgtacacaccgtcggtttcatgtgcgcagacgattcagtttcatgcgcgcccgattcagtttcatgctcttccgtctgccgggacaccctcccctctcctcctcttttgcctgggtcgtgcttattcatcctgtaagacacagcttaggcgtcacctcctccagacagacagacacgtgaagatcaagaggctagctttgtcatcagtaaagctggttggaaaacagagctttgaacctgtgggaaggtgggcttacaaaacctcgtccctgagtctaacagtcagaggtagagacccccctcagggcagttcctgagcacaccttgtggggaggtgaacaggtgggtgggctctgagagaacccacaggagctgagctgaggaagagcgcctcctgtctggcccaagtgggccaggtcactccctgcattgtgggagcagagagtacgggacagaaagagtgagggtgggaactggggagtggggacctacttcatgtgaaaatgggaggtcagagaactggtggctcccctccagcacagagcacttcatgaggaaagagacacttaggtttcaggctgttgttagatacatggctgtggctggtgactttgctgaggttctgttttctcttctgcagaatgggactaattacctgtctttcacatgtttgctgtgaacattggctaaaataaagtaggtagagagtggtgtctgagtctgcgaggtggtcagctcagcactaaacccagggcccttggttccgttttcttgtactgcccttctccctgattcttctcgaacctcccatctcctcttccactgaaggaaggaagaggcaccgtgatttttgaatggggttgtgtagctcgtaggggagttgggtatgtgtgaggaagggccagtgagttggtgctgcattgttcctgggtagttaggtgacagctggcagctcagtatttagtgacctaaacagggaggctccagggacaggagcagatgcagcctgtctgagggcggctctgcccttggctcttgggtcccccacagcgttctggcccggactcccggtgagggtggagtcctgtcggcctccagaaggaagcccagttctgaccatgccctctacccttttgtattcagactcccaccagcatctgggaggacttgcaccagcctgctgtgcccttttgattcgtggagtgtggatccctgggctgagggacggagcagaatgcctattgtgcctatgttcctggggtgctagcccacctccctctgtggtgcagtgccctcatgactgcctggctctgagatggaaggaccctaaatgcaaatccatctctggagtggcactctcctgtgagcgctaggcatgatgaacccgggatgatggtacttgatcagtgtgcaggcactgtgctcagtactggacatggatttcccctgtctagtccttgcagcgaccccatgcagcggctactgttatcgcctctctctcattgagcagaatcaaggctcagcgatggaggaacttgtccagcatagggagtccttggtgggagagcatgggacttcaaagcccacctcttaaactgtgagcccaataccttctggcttttcatccttcagtcattcattcaccaaatgtttacaaaggcctgctgtgtgtcaggtgctgtgctggctctaggcagggtgtctccactgcggcactgtcgacctttggattggatcatccttggctgtcctgtgcattgtaggaaattttgcggtgtctctggcctctacgcactagttgctggtagcaccaccaccagttgtgacaggcaagtgtctgtggacagtgcccagcgtcctccaggggagcggggtaggtaaaactgcccttggttgaaacccgctgctctaggaatccataagcagaagagacatgtcaggtggggctctgtcctctacggtaaagtaaagatggacaagaggaaggacggtgcatgctggaggggctgctgtgtccagatcgggctgtctgcagaggcctgtctgacaaggtgacttttgagtaggggcctgaataaagtgaggaagagatcatggggatgtggaaggaagagtgtgcttggcagagggaacggccaggacagaggccctgggtgggggtgctgggtgtggctggggcaggaggagatgaggcagagaagttggggatggggtgggtggggtggcctcagctttcaccctgagtgagtaggggtgctgctgggggcattagagcagaggtggtgagacaggtcatctggcccctgggtggactgggggacagcagggagggcagctggcaggtgggggtcacaatgtaggcagcagatgctggccacctgggggagggctggggactttttgattaggaggatgacctttgggttttctccacattgaaacgatcagtgcaacacctgcccacggtgaaaacacccatccatggcccatctcttctcaattcccaggacgaagagtgccacgaagagtgcctctccagtctttcagctgttacttcattggagggacactcttcttctaccaccatttcttgaattggcacgttttagacattaccagtttcctgctggaataggtagaggttgtgcgtgcgcatcctgagcatcctgctgggctgaagggagcagcctattttgttctctcctttctcagggctctgcattattttcttcttcatctgggtgtcctaatgtacctttgtggccccccccaactttttttttttttttttttttgccttgcagaacctttagcatctctctcattctgttcttcctcctactaaatggttgacccccaattttatttttttttttttttgagacagagactcgctctgttgcccaggctggagtacagtggcgtgatcttggctcactgcaacctccacctcccgggttcaagcgattttcctgcctcagcctcctgggtagctgggattacaggcatgcaccaccatgcctggccaatttttgtatttttactagagacagagtttcaccatgttggccaggctgatcttgaactcctgacctcaagtgatctgcctgccttggcttcccaaagtgctgggattgctggcacgagtcgctgtgcctggcctgacccccagttttaatcatcttatgttggcagctgtagttttagtcatagctgtctcttggtaataatgaaaaaggaaagtatctttttaatttaaatatactttaagttctgggatccatgtgcagaatgtgcatgcttattacataggtatacttgtgccacggttttttgctgcacccatcagcccgtcatctacattaggtatttctcctaatgttctccctcccctagccccctaccctcagacaggccccagtgtgtgatgttcccctccctgtgtccatgtgttctcattgttcaactcccacctatgagtgagaacatgcggtgtttggtcttttgtccttgtgataatttgctgagaatgatggtttccagcttcatccatgtccctgcaaagaacacgaactcatccttttttatggctgcatagtattccatggtgtatatgtgccgcattttctttatccagtctatcattgatgggcatttgggttggttctaagtctttgctattgtgaatagtgccgcagtaaacatccgtgtgcatgtgtctttatagtagcatgatttataaacctttgggtatatacccagtaatgggattgctgggtcaaatgatatttctggttctagatccttgaggaattgccacactgtcttccacaatggttgaactaatttacactgccactaacagtgtaaaagcatttctattactccacatcctctccagtgtctgttgtttcctgactttttaatgatcgccattctaactggcgtgagatggtatctcattgtggttttgatttgcatttctctaatggccagtgatgatgagctttttttcatatgtttgttggccacataaatgtcttctttggagaagtgtctgctcatatccttcacccactttttgatggggttgtcaaaagctggaagcattccctttgaaaaccggcacaagacaaggatgccctctctcgccactcctattcaacatagtattgcaaattctggccagagcaatcaggcaagaaaaagaaataaagggtattcagataggaagagtagaagtcaaattgtctctgtttgcagatgacatgattgtatatttagaaaaccccattgtctcagcccaagatctccttaagctgataagcaacttcagtaaagtctctggatataaaatcaatgtgcaaaaatcacaagcattcctatacactaataatagagagccaaatcacgagtgaactcccattcataattgctacaaagaaaataacatacctaggaataaaacttacaagggatgtgaaggacctcttcaaggagaactacaaaccactgctcaaggaaataagagaggatacaaacaaatggaaaaacattccatgctcatgcataggtagaatcaatattgtgaaaatggccatactgcctaaagtaatttatagattcaatgctattcccatcaagctaccatgcactttcttcacagaattagaaaaaaactgctttaaatttcatatggaaccaaaaaagagcccatatagccaagctaatcctaagcaaaaagaacaaagctggaggcttcatgttacctgacttcaaactgtattacaaggctacagtaaccaaagcagcatggtactggtaccagaacagatatatagaccagtggaacagaacagaggcctcagaaataatgccacaaatgatctttgacaaacctgacaaaataagcaatggggaaaggattccctatttaataaatggtgctgggaaaactggctagccatattcagaaaactgaaactggaccccttccttacaccttatacaaaaattaactcaagatggattaaagacttaaatgtaagatctaaaaccataaaaattctggaagaaaacctaggtaataccattcaggacataggcatgggcaaagacttcatgactaaaacaccaaaagaaatggcaacaaaaaccaaaattgacaaatgggatctaattaaactacagagcttctgcacagcaaaagaaactatcatcagagtgaacaggcaacccacagaatgggagaaaatttttgcaatctatccatctgacaaagggctaatatccagactctacaaggaacttaaacaactttgcgagagaaaaacaaggaaagtgtattcttaatgtttccttgtctccatgatcatccttctgtgatgtttttgtaatcatcaatttattcttcattcctagagtcctaattatgtgattagaacctttctagaattcgctgctaaaaaagatgaactacacttgcaaaaatgacctatactcgattcagtttcctggaattggaagcctgcattccagatgaggcagcagaaaaagtcagagtttgtttccttgaaacggtggctaccacttgatcccataccatctggcagttgtgtgtgttgtttgaaaatcaaggcatagtttgatgcttgtgggtactgagctgccaggagaatcttctcaagaaaaatcaggcacagagatcacccaggctatggttctttgaggtcagcgcttttaaaaaacttgtgtccaggtgtggtggctcatgcctgtaatcccagcactttgggaggccgagatgggcagatcacctgaggtcaggagttcgagaccagcctggccaacttggtgaaaccccatctctactaaaaatacaaaaattagctgggcgtggtggtgcatgcctgtaatcccagctatacaggaggctgaggcaggagaatctcttgaacccgggaggcagaggttgcagtgagctgagattgcaccactgcactccagcctgggtgacagagcgagactccatctcaaacaaacaaacaaataaacaaaaaaaaaaaacccaaaccaagaaacttgttgccactttttctttgaccttcaggttctccagatctccaggatcattcccaggattagctgtgggttggggccattattttcataaagtgtagttggaagtttccttaaatagtgggtgtacctgtcactgtgaatactggaaacctcttgttatgtttatccatgcaaatctttgttaaaaatagttggcaacccttgtctttattgttgtgcattgtatgcagaactttctttgctttccagacataagatccaaaagacaaattgtactgaagaaagcgaactggaaagaatgtcaaagacttgccttctagggctgggtctgaatgtctgctgggaatggcggtgtgatttgaagagttggctccaaatgcagatccactcgggttttattaatgcttccttctgcagggtccctgctcatccacataggaaggagattgaggcttactttggaattccagggaagtcagcctcagtcttcagagcatgaggcaacaccgtgagcagtttcttaatggtgagggtcacagttaacccaaaaatgaggccagactgtgctgagagtctaatttatttccttccttcctcccttcctccctccctccctccctccctcccttccttccttccttccttcattgtctcactctgtcgctaggctggagtgcagggtcatgatctcagctcactgcaacctctgcctcctgggttcaagcgattcttgtgcctcagccacccgagtagctgggattacaggcacacaccaccacacctagctagttttttgtttttttcttttaatagaggtgggtttttaccatgttggccaggtaaaaacctgaccttgtgatctgcctatttcagcctcccaaagtgctgggattacaggcgtgagccaccacacccggccaggaatctaatttctaaagtgcattttgggaaaaaaaaaatccacccacaaatctttattaaagagtgacccttattagtctatatgtgattttcttcttttctaagtagcactggtgactcaggtgatgcattttagtgatggaaaaactcaaaacacagagacaatgctgtgtttccagggtctcctagcccttctctcctcctgccccagaagccttcaggcccagcagtgcggtgtgtggtcctgctgcacaggtgagccacagtccttggagtggagagattagcttggaaagaagagatctgcaaagctctttttgggcgaatattaagtttggtgaatgagtggagaagttgggtgggggactgcgaccatatttaccagcgagctcagcggtgggcgtcctggctggcccagcatgagaggagatgaagagtgattgcttcctggaggagtctgtactaatccatcttcataagcctcagccgtggctcctctggagggacagagccaacgtttccatctaagtaacgcgagggaggagggagagatgctgaagcaagattgtcacagcttaatgatacgaaatgctctcaccggggactctagaaacttggcttctgtgagtttcatctgctcacccctgccctgtgtgggctgagggagggactgaaaagctcccctcctaatgtgtcaatggctttgccaggaattgcatcggtggtgtgtcaggcgggctgttgtctggtttctgtgacagagaccctgagcaacactggtttagacaaggtagaattttctttcttcccacttgacagtttgaagcccagtccactcttcttggtggtgccattacatttcagatgttgcccttgtccacgtgtccatcacatgcacatttctgccagagcggagataaggccccctcctcggccccctccttttctgctgctgcttgtttttctttttcagacagggccttgcagtcacccaggctgcagcgcagtggaatgatgataccttatggcagcatccacttcccggtctcaattgatcctcctgcctcagcctcctgagtagctgggactacaggcacgtgccaccatgcctggctcatttttctattttttttttttggtagagacagggtctcactgtgttgcctaggcttatctatgactcctgggcttaagcgattctcctgccttggcctctgaaagtgctgggagtacacgtgtgagccaccatgcctcgccccttttatttaagggtatacccccaacttccagtagtgcttccttttttttttgagaccgggtctcactctgtcacccaggctgcagtgcagtggcacgattatggctccctgctgccttgtactcctggactcaagcagtcttcccactttagcctcccaagtagctgggactacaggtgcatgtcaccatgcccagctaattttgaaattttttttgtagagatgaggtctcactgtgttgcccaggctggtcttgaactcctgggctaaagcaatcctccctcctcggcgtcccagagtgctgggattccaggtgcgggccacggcacatggccctgcatcacttcctattaacctcaccttggctggaattagttaaacggccacagctgcaaggctgcacgtgaaggcgagagatgtctttattctgagtggtcacctggccagccaaggcgcttcagttactacagaagaagaaaatgggtgtggggacagctggcatctgctccaggtggaagacagcacgggccaatctgactgaccacagcactgtgggttttttttttttttttttaaaacgtttttgcttcgaaagaatttaagacctggtgcggtggctgatgcttgtaatcccagcactgtaggaggttgaggcaggaggatcacctgaggtcaggagttcaagaccagcctggccaacatgccgaaaccccgtctctactgaaaaatacaaaaattagccaggcatggtgactgaggcaggagaatctcttgaacctgggagacagaggttgcagtgagctgagatgcgttccttcattccggcctgggcaacagagtgagactctgcctcaaaaaacaaaaacaaaaacaaaaaaaagaggagttgctggttatgtggatagaagagaatcgaggtgacgagtgggtggtgggcaccgtggatgtgatgactgcctgccctgtccaggcatctgcttgttctggagtttcattctcagacatcctccccaggcccagaagcaggtgttctgctacccgtccataggaattcttcattaggaatgaagaaactgtgtgccacagggattgattaacaatcgtgttttaagtgatagaattaggtactgttgaagctatgaaatgaattaggctgtgagcttttttttttaaggccaaagattgattgacggtagtggaatgagacttcgaaatttattaggagttgctagaaaaataaggaggggaaaggtccatgttgaaccatagagattttccatttgacatcaattgctctttgctgttccaaggaggataattatgctacccgagctgagatgcagatgggccaggctctttttggacaatctttagggtaggagaagccctcccagtggtagaggaagttgacttttactagccttgtctggcattctttgatgagctatggtagaggttaggaagggccaggactgaggtgggggagaatgccacctggctcttgaggctgggaccccaggcctgatgccctccttatggaagttccatgccaggccagggggagactccatgatggtgagtggcttccatgagaaaaagacaactgggctggacttgaccatgggagaaccaagtcagcaggtgcaccagaaggtgtcacggcacctggaggctggttctggctccagacttgaaccttttgagtcttggaggtgctgtgttttctcttttaggagaggggtcagaggcatccaagcttgttgggtgactactatatctgggcagtgtgcatgcgggaacctccatagcctgtagctctcttaatacctacaacagccctgtgagttgagtgatcatgtccctgtgccccgatgccacagctggccatcagggaggttcagtccattacgtagagttatgctggtggtggccggtgcaagggtttgaacccagcctgagccctgaagcctctgctccatccatacacacgaagctgtccctgtcttgttcgttttctgttgcttataacagagtacttgaagttgggtaattaataaagaaaaggaggctgggcacagtggctcacgcctgtaatcccagcactttgggaggccgaggcaggtggatcacacggcaggagttcaagagcagcctggccaagatggtaaaatcccgtctctactaaaaatacaaaaattagctgggtgctgtgacaggctcctgtaaccccagctacttgggaggctaaggcaggataatcacttgaacctggggagcagaggttgcagtgatcccagatcatgccattgcactccagcctgggcaatagagtgaggcgctgtctcaaaaaaaaaaaaaaaaaaaaaaaaaaaagaaaaggaatttatttcttagagttgtgcaggctgagaagtctagagttgagagtttgtatctggtgaggaccttcttgctggtggggactctctgcagggtcctgaactggcatagagcagcagatggggaggggactgagtgtgtgagctcaggtctctcttcctcttcttaaaaagccaccactccaaaaatgggcccactcccgtggtaccccatgcatccattaactcattcatccatgagtgcatgaatggttcaatacactcatgattgccaagctctcatgacacagtcacctcttaaaggccccacgtctcagtactgctactggggcttaaatttcactgtgagttttcgaggggacaaacattgaaaccacagcagccccctgtcagtggcctcactacagcactagtcctaattgtctacatccgggaccctcatgcatgcaccacgaagctgctgtcatctggagcaaggagggacatggtgagtaggggatgcccagccgtgcagactctggaaagctcctgcaagaaggctcaagggttaacctgttgagcttccattgccctcatctttttttttttgacacggaatcccgctctgtcacccaggctggagtgcagtggcgcaatcttggctcactgcaacctccgcctcacaggttcaagcagttctcctgcctcagcctcccaagtatctgggattacaggtgtgcactaccacgcccacctaatttttgtatttttagtagagacagagtttcaccacgttggccaggctggtcttgaactcctgccctcgtgatccacccgccttggcctcccagagtgctgggattataagtgtgagccaccgtgcccggccctcgtctttaaaatgagtgtgatctcactgtcctgccgtctgcactgggcaaagtgaatacggaggctccgaccctaagctggacctgtcactggatgctgagcttgcggggaggtgtttcagaactgcagctcacgtgtctaaagctgcaaatggctctcagatgactctcttcctgcatccctgcttggagatactttcccctgaagctcctgaggcaggagagaggtggaagcatcctttatttcctggggtgaggcagcccttcctcccatgtgtctaacgtctcctgcagcccagcatgtcgttccccacttagtctgattaaagactaattttctagctctgaaggtggaacttagaacagactttttccttttctccaggtgagtgggttttgcacagatgactcagaccatagactgtgatgaacacagaagcaagagtccagcttttagggccaccttttggcctgctgagccctgtgacgaggaagggacggccttttgctagggaagagcaggtgtggtggctgggctgcttgactccctttggtttctgaaggcttagtggttgggcttgcggtgagacaaacgcccaggcttttaaaaacaccctgctccagggtggtcaatgtcacttcacacaatgccttggtatctaaaccaacctctggactacagcagttgtatcatccagttttctgttgacagtctgtggacctgagcccttttaagacagtgtggtggcctgaggaaacaaacctgattattaacaaaaaatggtgtttttcttttttaattttttttttttgagaaagggtcttgctctgttgcccaggctggagtgcagtggtgcgatcatagcccactgtagcctcaaactcctgggctcaagcgaccctcctggctcagagtagctgagatcacaggtgcacgctaccacgcctggctaatttcttattttttgtaaagatagggtctgtagtgagctatgttgcctcaaactcctagcctcaagtgatcctcccaccttggcttctcaaagtactgcgattacacgtgtgggccagaaagcagtgtttttctgagggggccaaggtcttaatacaatggcatgttcacaagggctactgaggcgatctgctgcatgcccctgcaccccagcaggatggtggtttatcttgacaggtgcatgcacacacctgtacccttccacccctgcaccagtcagctcacttccctgcccagcaccctgctgtggcctcgttctgcactttagcacaaaatccatgtttttgctgtggcctgcaaagcctgcgtgatgtgacccctgctgccctttgccttccatgacctgtgcttgtcacttgccagccacactggcctttgagccgttcctcagacttgccaagttccttcttacctcagagacttgaggcaggctcctccttccctccctgcgcaggagtccacttagcagacttccctttacgtctcagtgacacagtggggaggttcccggccccttcccactgcaaggaaagcaagtgcctgcttccagcctccaagatggcaggcagcaaggagaatgggttgggaatggctttgggcatagccacccagcagagcttgtttagttgagtgtgatggagaggtcacctagactgaatggtgtgggtagcaggtggcaggaggcatgagagtcatttcagatggtttaggaaagcctgagtgagagcgagagatcttcaggaggctgctggggtaaagcaaaatcatgggagtacggagaggtgagatttgagagtgtgtgtgggttgcttccccagatccgtgtcgcctgcttctctgaagatctgagatggggtgtgtggtggggggtctaggaagcactcactgcatagcagtgaaatgcacagtcttcattccggagcagggcgtccgcagacacacccaccccgtggtcatcgttcccagggctctgctggcagaggatgcacacagaggttgtgcgcagaggttgcagtggtttgcaaaggtccaaagctatgtgactgctgaactctgggagctcttggagtttactgctgggtgaagctgggtcaactgcccaactgtaccttcacctcccttcgtagaagacagggtcggggtggaggaaggggagctgccagctgccagtctgtcctgagagtgcccagtcacgagccacaggtgcttccttaagtttggagctctgttctggaagcagcagtgtgctcctgcccctacctcccctccctcttaagtttgaatcagaacaaaggcagttcttggtgaggaggcaactcagaaacagggggcagggcagacttcgggcacctccagtgtcatctctgcgtggctgctgaggtggagatctggggctgatttagtcccatccacgtgtattcatgaaggtgctgccatcaggcaatgtactaggctgcatgcgtgagggaaacgcagaaggcatgggtggaatcctgctcacaagggactcgccatttagctggggaggctgtgaagtgaatgccgaagacgacagcagccccaagcgggagaagtggctttgtctcgtgaggtccaggtctcttctggcaagacagcttgtctgagctgggttttcagtgtgagtttcgagtgaaagggtgctaaatccttgaatgtcaaaacccactgattgttcagtttccagttatatttttgctccaacatcactggtcctcaatagcctactgtccttagcttagaagtgcaggtacctgcactgggtacagctggatgtataattgccattctcttcctgccggaggaggatggaatggagaatatttcccctgtattccacatgttaagagatcacctctgcactggattcattggagcacctggaaggaggcctgatggaaaccacgctgcctgggacagcgtggtggactctgagtctcaggagatccacatgattcccattgtgtttgtccagttatgctctgagtgtctcttgttgctccgcatttctgggccttgcttgccttgactccaagactgggcagcatcctctgcttcccttccctgctctccaggactgaggaagtggattgagcagtcactccttaggcaggcattagcacggcatctttcattttgcagatgcctaatctcttttccccattgaatcacctccataatttgggaggttgtcaggaggtgccgtcatgcccatttcagaggtggggaaactgagcctcagagcagacaagccacacatccatggctgcaagggaggtagagtcgccgagccgggctggaacctggcccctcctgactacatggctcctgtgttctgtctaaggatgttctggttatttctcaaagtgtcaggtgcagagtaggatggtgcagagttggtgagattcactccgggtgtgagatctgcctgcaccctctcagtggctggctgcatctaattaattgcagattatgtgtgagagtctgtttgagaattgcccgtgcatatgataccacagcctgaaggggaaggaagctgtgcagctccgcatcctcattatttatgagtatttcacatgcaattaatcttccttgccaccagttaaccccaccactccactgtgcatgaggccagtgacaacagatgttggcctcgcagccccaggggccatggcagactcagggctttagacgggtcggggtcatatctctgctggttgcatttggccggcgagcggccagcggacaggaacagatgacgaggacagctaatgtgccacattcacttgcaggagccagaaactggtagggctcatctgctattcctgatgaatcacagcatctgagagctagaaggattctagaagatgagcttgtgtaacctccgcattttgtagatgtaacatctgagacccaaagtgggtttgaaatgccatgccagttagaggctgggcccacagtccttgtctgttacttgccgtgacatcacatgtctttgcttataatgtcatttttctcatcctgtatatctcccaccttgctggccacgttgcctcccgtgccaactcagtgtaggttccacatagcatatgagctgtgactcatttggttacaagggacagaaaccagctcaagccagcttaagtaaaataagggaataatatcgttcccctaactccagcatccagaggtacagctgcaagtaggcgtccctggatcccagggttggatggttttcaggtctacccctgaagggctctgttaggaggagagaggtgcagagaagcacacgtccatgacctgtggccatgctggctttgccccaatcctgttgaggctctgtctctaaaatgacatgatggtcttgagaatgttgatttgtgcagaaccaacatgaagccctggcctcctcattctgagatcccattcgggagacagtgagtatcactgtggttatgggttccagtgtcagatggcccgtgtttcagtcccggttctgtatcgtcattcctttttttttttttaattttgtttttgttcttcttgagacggagttttgctctgctgcctaggctggagtgcagtggcatgatctcagctcactgcaacctccgcctcctgggttcaagcgattctcctgcctcagcctcccgagtagctgggattacaggtgccccccaccatgcctggctaatttttttgtatttttagtagagacggggtttcagcatgttggccaggctggtctcaaatgcatcataattcctttgtaatttagggcaaatcacttcatatgtctcagtttcctaatctataaaatgggtttgattctaaacacctgcttcgtggcgtgatttggagggtcgaatgagataattgacacatagtttcaccctgtgcctggcactcggctggtgccctgctagcagttgctattaggaacacttaacttctctcggtctttccatctgtgaaatgggggatgacaccaccagttccatcaaataagggactcgctggttcctttagtacagtcaagcccagacctagccttcaaggttggcagtggatgaaaaattgcccctggcagaagctgaagtccgtccctccccctccgttgctttttccttcagcccccctcgctgctttcactgctgctggtgttgtcttcttcttggctgggaatcccatcctatctgtggtagggactggattctcctccacaagtaccgaaggaagaaagtgggtttctcagtctccctagggtttatagactcatgcagctttgagagccaggccagtgaaaccccaggcagggatgggacacagcagggtcagacatgctctgaccagagaaattcaggggagtttttgctgcctctactgtatagcccaggccttgcccctgggttgctccaccttgatttgtgtgtgtgtgtgtgtgtgtgtgtgtgtgtgtgtgtggtgctgggtactaagtggaatcactctgtaaaggcacatagaacagcctgttattcacaagagctcatgtgaatatctttgcagaatgtgccatctcttcttgcagacctactgattttgtgttttgcagtgaagaatgggtaggctccactatgcacggtttcacatttatctggagccatctaattaacacctgtactccacttgtcacctgaacctggtcctttggcgggtttctgcaatatgttcctcctcgaggcctttctttgtgaaacacatgtgtacctcgcttgcagctctctgcccactgacggagaagtgagtgagcctcttgtgtaattgatggataagccctccactgcaccccgcaagaggagtattcttaggggagcagctgtcttcctttccaccctcgtcccactctccctaactgctttttcaactggatcagtaaggatttagtgttaaacaatatttggattcattgtggtgaaataatccaaattgaccgtgccaggtgatggagacaaagatatctgccatactaatttccaaactctcctgtaagtgcaatatagtgattttgaaaaactctctctcctaattgtgggaaacagtttggtggatccttaaaacgttagtggaattaccgcatgtccctgtaattccacttctaggtacacatccaaaagaactgaaagtagagactcaaacaggtaactatgcacaaaggttgatggcaacatgatcacaatctccaaaaggtggaaacagctcagtataaatgtccattatctgaagaatggattaacaaattgtggcatatccatacagtggaacatgattcagctataaaaggaatgaggggccgggcgcagtggctcatgcctgtgatcttaccactttgggaggccaaggcggggtggatcacttgaggtcaggagtttgagaccagcctggccaacatggtgaacgtcatctctacttaaaaaatacaaaaattagccgggtgtggtggcgggcacttgtggccccaggtacttgggaggctgaggcatgagaatcacttgaacccgggaggcagaggttgcagtgagccaggatcacgccaccatactccagcctgggccacggagtgagactccttctcaaaaaaagaaggaatgaggcactgatacatgcttcaacgtggatgaactgtggaaacaggcttagtcaatacatgcttcaacacagatgaaccgtggaaacaggcttagtcaatacctgcttcaacgcggacgaaccgtggaaacaggcttagtcaatacgtgcttcaacgaggacgaaccatggaaacaggcttagtcaatacctgcttcaacgcggacgaaccgtggaaacaggcacggtcaatacgtgcttcaacgaggacgaaccatggaaacaggagtggtcaatacgtgcttcaatgcggatgaaccatggaaacaggcgtggtcaatacgtgcttcagtgcggacgaaccatggaaacaggcgtgttcaatacgtgcttcaatgcggacgaaccatggaaacaggcgtggtcaatacgtgcttcagtgcggacgaaccatggaaacaggcacggtcaatacgtgcttcagtgcggacgaaccatggaaacaggcacggtcaatacgtgcttcaacgcggatgaaccgtggaaacaggcatggtcaatacgtgcttcaatgcggacgaaccgtggaaacaggcgtggtcaatacgtgcttcaacgcggacgaaccgtggaaacaggcgtggtcaatacgtgcttcaatgcggacgaaccgtggaaacaggcgtggtcaatacgtgcttcaatgcggacgaaccgtggaaacaggcgtggtcaatacgtgcttcaacgcggacgaaccgtggaaacaggcttagtcaaaggagccaggcaaaaagactctattaaaaaagaagaccacataagagatgattccgtttctgtgaagcattggagtaggtaaattcatagagacgcaatgtggatcagaggttgccagggaggaggatgaaatgggaagaaattgcttaatgggtaagaggttttgctttggcgtggtagaaacgttctagaactggatagtagtgatggttgcacaacattttgaacgtactaaaggccactgaattgttcactttcaaatggttaattttatgtgatatgaatcgtacctcagtacatgatttttaaaaaaccttcagtttggcggggcacggtggctcacagctgtaatcccagcactttgagaggctgaggcgggcggatcacaaggtcaggagattgagaccaccctggctaacacagtgaaaccctgtccctactaaaaatacaaaaaaacttagccgggtgtggtggcatgtgcctgtagtcctagctccttgggaggctgaggcaggaggattgcttcaacacgggaggcggaggttgcagtgagccgagatcccaccactgtacttcagcctgggcgacagagcgagactctgtctcaaaaataaaaacaaagaaaaaaaactttcagctgtgccaccgctccccacccgcttctcactagccaagtaagcctttcgcttagttccattgcttctactgctggaagcaacctctgcaactttgtgcttttaattctggtgagtactcctttaaagctaaagtgctcatgatgccttttaaaagaagactgtagatagtagatatacagaccacctttttttttttttttttttttttatgagatggagtcttgttctgtcacccaggctggagtgcagtggcaccatgtcggctcactgcaacctccgtctcctgggttcaagtcatcccctgcctcagcctcccgagtagctgggattacaggtgcctgccaccatgcccggctgatttttgtgtttttagtagagatgggatttcactgtgttggcctggtatcaaattcctgacctgacgtgatccgcccacctcggcctcccaaagtgttggtatgacaggtgtgagccaccgtgcccgccctagagaccaccttttgatgccttgatatgaaatgagaacatatatgtggaaaggtataaaattaagagacaccctcgaccctcacctgagttactgctcctaataaattcacgcatacctgagtgctgtgttttctagccttctgtgagtgggacaggcagggtagggatgctcggactgtctgtggtctctgatttagtcacttcgaggctgctgtgggagttcctctggggtgtccattcactgtcccctgtctgcctccattagatcccatctcaggccccttccaactctacacttctgacattcactgatgtgggtggaatgctgctttgtaaaaatggccgtgcaaatgtgtgctaattaccttgacatttccaagctgcttggtgctcagaactcatactttaggacatgaggctcacaatagtgatccacagcgtgatctcttggacctgtgtggtaagaacctcagtttacagtgtttaaaaatcagatctgtgtaaaaatgtgactcctggcttctctcaacaactcaggactggtggcagccatgtccccgcatagacagtggattggaggcagggactgctccttagccggggtcctctcgtcccactgtaccctgtgaggactttgctccctggaggccctgtctgtatccgcttttgggatgcctgccttaaggattcgtagtacaaatctttataaacgctcactgtgtgtgtttgtgtttgagagtgcgcacatgaacaagagagagaaaaccaaaaaattacaaatctggaaaagttaataaagatctagaaccttatcaagattttgcaaggggtttttcttctgtaccttgtgactttcttccattttccatcccattcccatgagtgcctcacatttgtgttttctgttttgagattataattatgtagaaaccatagttctaaaactggaaagggccagaatttaatcacacttttgattttccaaaagaggacagagaaagactgggagaactgccagaggccacaccctgggaactggtgtgagtcctgaggctgtgcgctgcctcccaggagccgggctgggcctggcactgcccgcttggggggacaggccttcaagcaagctggaccaggtgtgggtccttgcctggccacttcctggctgtgtggcctgaggcaagtcacttcccttctcctggtctctgttgcctcattcagacagcaagtgtaatcatgcttgcttctcagaaaccttgtgagaattacatgagatcgtgtatttcaggtgcctctcgcattgctgggtgtgtatgaaacaggcagtgtgtggtaaccactggccatctgagccctgcgaaggggtcttgggacattttttcctcctttatcttaacaaattgaaaagaatagaaactctgggtgggctaggggaggagggtggcaggagagagaaacagaacgaaaagttagaatgggcctgagtaatttaaaagttacattttagagctcgatatagtttatcctttcttttggagataaaaggaaagggagtgggtaggcagacaaagatataaaaagcaggatgttaagtttgaaaaatgatgatgtaggttaagtccatccctgtagaggaacattctttatttgtgcatgtgccctcatgagctctgtctttaaagatagctgagtatgggccgcaggggagtgtttgtaaaggctctttgaggtctttggaaaaagatgctatataaagccagggagttattgcacagatctatgtatatatgtgagagagtgtgtgtgcgcacacatgcgtccacacgtcaccctgtctagtcatcgcagtcagcagtctcttccctttttaattttgaaaaggcagttgaagatcaatgagtctcaggataattccccccctgggggcctttagtggctgaagaagagacgcctctcacccctcccttggtgtcactgtttcattgctttatatagcagcctccgaggccgtaatcatttgtgtgaatgggcctgtgcgtcatctggctgtgtgtctgtgtttatgtttgggtccctggggactggaggctggtccctgctccactgttgtttttgaaattgagcattcatgtggtcactgccgagaaaggaggggaacggttttgtaggctcgtcctgtttgaggtcatggtaatgatgtatgggaccgtgtcccctcctccccatgcctgtcgcattcccgagatgcataatggaaaaagctcaacgggagcctgaatctctgtcactggggcaagaaattacagctgtgaacctgctggttagtgttctgtgccgaggccttgaacttatgattaacgtggttgacgtttctgtccagctcatcccatgctcagttcctggagctgagggtggcgttttagcagtgggcgactgtcagtcattcatttgtttatcaattcacttacgcatcttacctttgatcattcaccaggtctcacgtgtgttctgtgctgggcactggggccccggtactcaagtgacccacaggcttgggggtggggctttggtgggcagaggtgcagatgggcacctctagcccaggggacagtgtgctttcgtggaggtgcatatgaagagcaatgggaatcactgaactctacttggattgtttggctgtgaggacacagaacccatgccaatttagaacacaagggcacagaaccccataggggctcccccagagcctgggagccgagagtcctgcagaagccagcatggccatttgtgcatgactgctttattccctgtggccatgcggtcactgcaggtcggcccgcacttctcccgctggcccttgggtagccgccttggctgtggtggtgcagcaggagacgaaggcaggaatgaggagttcactgagtcaccttaggctacagggctctgtagtagcgcttgacatttccaacacctgccgctttgccagactcggcactttctctgtggctgagtgggcttgccttgaagggctttgctggctcccctttttggtggccctctgccttgtggctgcatctgcatttgtctctgtccaggcctctgtacatggcgacagaggagcctccagccaggggtcctgggcccagtttagggtttcatttaagggtgggtttgtttatttattcatttattgtttattttttgagatggagtctcactctgttgccaggctggaatgcagtggcgcgatcttggctcactgcaacctccacctccctgcaacctctgcctcccgggttcaagtgattctcctgcctcaacctcccgagtacccaggactacaggcacgcaccatcacgcctggctaatttttgtgtttttagtagagacgggatttcaccatgttggctgggatggtcttcatctcctgacctgaagtgatctgcctgcctcagcctcccaaagtgctggcatcacaggcgtgagccactgtgcccggccaggatgggtttattaaactggtcttttgagcacttggctttcggcaagtcactatttcagtgtgtctccacagtcaccgtggtggagtgacttggaactctttgctcttgggccagatgcctctgtcgccaccttccttcgcgtctcttgtcagcctgtggcacatctgaacttctggaagactctacatgatgggcttggtttgagtcagtaggtacccttggtctcactgattacaagtggggtgggtgggactggaggcctgtggaggctgagtctctgagcggaggcaagagtaagacagggcaggcccacggactcccacgactgctatagccagcaagccccagatgctcagaaaaggcgctccccaagcagaagcttgaaggacaacctggagtgagggagggggccaggccttccagacactgggaaacagcctgtgccaagacacagaggcacgagagaaggagagtgtgttcagtatggttggagtctaaccaagggggagcaaaggagatgggcagaggctggagcggcagagaggacatgggtctggagctcaggagagggcctaggtggagatgtgggtgtgtgcagggtggaagcggtgactgaaccctcggcatagatatagccttatattcacatagcaccactgaggccgggctccaactttttcattgcctatcatctctgttattaataatttaaaaaaaattttttttctaggcggagtctcactctgtcacccagactggagtgtggtggcataatctcggctcactgcaatctctgcctcccaggttcaagcaattctcccgcctcagcctcccaagtagctggaattagaggcgcctgccaccacacccagctaatttttgtatttttagtagagatgaggtttcaccatgttggccaggctggtcttgaactcctgacctcaagtgatctgcctgcctcagcctccaaagggctgggattacaggcatgagccaccgtgcccagcctaatttttaaaaaattttaactatatgacaaaaattgtatgtattcagggcatacaacatgatgatttgatgtatctctgtatttcgttatgactaccacaatcagatgaacatatacgccacctccccgagtgaacatttttttgtgttaatgtgtgtgatgaggacactcaaagtctgctctctcttcagatttcaagtaaacagtaccatagtattgttagccagagtccccgttgctgtcatgagatctgcagaacttactcatcttctaacagaaaattataagaggtacattttggccaacatcacccatctctctcacatcctcatgtacatacatatacatatacatcatatacatatatatcatatacatatacatcatatacataatacatatatatcatatacatatacatctatgcaggggaataatattcagccgtaaaaagagaaggagtctgaggcagcagtggccctcctgctgttccgtttctctccgtctgcagtgtcctgtgtgggtacagccagcggccccaactgattggcacagtgtcacagctgctgcagagctgccttcagccctgaatgaagaaggctgagagtggggcatggagggaagaacttgcgatgttctcctaagatgggctggcaaatgttttctggaaagggctggacagtagatatttcaggctgtgtgggccccatggtctctgtcaaaacaactcatcaaagcagacttgaacagtacagaagtgggtgggtgtggccgtgtttggggaaagctttactggtccctgctttatcctatgaggttggtgataccagcaaccttttccagtggaaggagctgagaagcaaggatgatatcatttgctgggatctcaaaccgaagtgtgagggacatgatattcaaaggtagatctgattagaaaactggtgttcaagcccgggcgcgggggctcacgcctgtaatcccagcactttgggaggccgaggcatgtggatcatgaggtcaggagttcaagaccaacctggccaacatggtgaaaccccatctctactaaaaatacaaaaattagccaggcgtggtggcaggcgcctgtaatctcaggtacgtgggagactgaggcaggagaatcacttgaaccctggaggcagagattgcagtgagccgagatcataccactgcactccatcctgggtgacagagtgggactccgtctcaaaaaaaaaaaaaaaactgatattctttctacactgccagtttactgccctgaggagcttaaagttccacaaacaatggaccagttttttcttgcgtgtgtgttagatgtgcccttgatgtgcagatactatagcaaaattattatttccttagcggagttggtcttttgtttcatgttaagaaagatggcatatatgtttgttcagatacttatgtagtttttattgcttcatttcacatatttaaacattattgtaccagaaatgtatttcagtacattacaggagcagagattcattgaaatctggtgtcttacttcctaaatggttccttgctcagctgcatttgtggatgaatccatcctgtccacagcattttcaatgctgctttttatcttagatcagtttccattggttgaaattgacattcccctgtgctcttgcctggttttgtggttctgtcttctgaagccaagcaaggaaccaatgttgagatggatggttgtttgcctttcagcggtaggagaggggaccccgcagcatggccaggctctgcagaggccacagtgcaggagcgctgctctgtttcactcgaaatgtgagctgtggcaggtcataaagaggaaggaaatcacaatgatagagactaaacaaatcatgggctgcgcggctcaggggagaggagagaaaattacatgttcgggagctcctctgctcgtgtgtgtcactcgtacttggcgaagtataatatttacctgatctgtggaaatcaccccgatgttacctaccagctttactgcccaaaaagagtcacaaaacagccaatgaggcagcgaaagtgaatgtgtgttcaggttcaagcccgttgaaagaacattttggggggcatgccagctctcggtccctttctttcttctccaccgttaacctgaacatgatgtcatagctgtgtggggaaggcggaaggtctgacagctcgtctttctatgatggatttttaaaagattcccactaccagagtactgctttggctgcacttgtgatatcagtcattttgatgttgataaaaacacaggtgcctcgtccaagaggctggagatgcacggtgtatgggacctgggagggtagggaagggtgaggctagggtgatacagtggatcgggtcggcatccatcgtcctctgtttctcacaggtggttgctatgcagtgatttgggctcctgcaaggggggcttgtggctgagatctctctttttttttttttttttttttttttttttttttttgagatgaggtctcactatgtcgaccaggctggtcctgaactcctgggctcaaatgaactcctaccttggtctcccacagtgttgggactgcaagcatgagccaccgtgcccggcctacatctcttaaggctacttgaggcagtacttgccaggcaagcattgctgtctctcaaacttcctgggaaacagttttttcctcctagaatttcctcctggaatataacattttcagctatgaggtctgagtagcagcactggggacccccttctcccatgcctgcaaggcccagaacccagatacctgctcttccaaatgccacatcgctgtctggggctgatttcccatattgccggtggtgatcttgtttcacacttcagaaaattctactatctagtctgctgctctagggcatagatcatttaaaaaatcttttttatttctcaaggttgaggtatacaggagctcagtaaatcccctaactcttgaaaatatgcccagtttaacccacttgggcttgtgaaccatacggctaccttatctccatcttcctatcttctgctgttgcatttctgcaaagacttgtagtgatactgatcagtagtacttgctaaatgctattctgtgctgggcaccattcctaagcatctcacttacatattgtcttactgaattcttacaacacttctaggagatagtaactgttaagatctcattttatagataagggaggtggtgctcagagggggttgctaacttgcccgagctgcagaggcaggatttgaacctgggacctgacttcagagactgtgctctaaaatccaggaccctgatcagccgagtctcttagactgttataggagttatttttgaaagggaaaagggaacttatctagacaagtcatccttaatagcatataatccagagaggtgagggcatgctgtaacaggcaagacctgccaattaatcttgactttgttttcttcccttaggtgaactgcgccaggccactgtggccatgatgaacaggaaggatgagctggaggaggagaacaggtaccgtgattttcaggcttgaggaatagcctctttctttgacattctgcctctggggaagacagaatataacagatgagggacattttgctttcttggcaaaaattgtgactggctatttcttatcgtcagggatatgccactgtggtatctctctttactgtggtatctctcttttgcctgatatgtaagaaagaagtgagaaccttatgataatggcaccttcatagaacaagctaagaatttggtagagtgatcattaattcttttttaaaaaacagcctttattgatatttaattcacatacactataattcactcatttaaagtgtatggccaaggcaggtggatcacaaggtcaggagttcaagaccagccttggtgaaaccccgtctctactaaaaatacaaaaattagctgggcgtggtgctgcgtgcctgtaatcccagctactcaggaggctgaggcaggagaattgcttgaacccgggaggcggaggttgcagtgagccgagattacgccattgcactccagcctgggtgacagagcgagcctctgtctcaaaaaaaaaaaataaaataaaataaaaaaataaatgaagtgtgtaattcagtagtttttactatattcacaggagttaacatcaacacagtcaattttagaacatttcatcacccccgaaagaagtcctataccctttaattatcacctccttagcctaggcagtctttttttttttttttgagatagttctggctctgtcacccaggctggaatgcagtggcgcgatctctgctcactgcaacctccacctcccgggctcaagtgatcctccagcgtcagccttctgagtggctgagactacaggcgcatgccaccatgcccggctaattttggtatttttagtagagttggggttttgacaggttgcctaggctggtcttgaacttctgagcttcagtaatctgcccaccttggcctcccaaagtgctaagattatagacgtgagccactgtgcctggcctctaggcagctgttagtcatcattaatcaaaggcctgtctatctaccatgttgcaggcatctgagcacttatcttaaagtttgcccaaatcagggatacttagggcaagatgaaattctggctcccatctgacttatcttgactgtggggtggtcatagagggcttacctgcagttaccccctgaacttctgcaagcatgattcaactgcctccctgggacgtggggagaggggggtgtgtgttcacgtcaccctttcttactcacacgctcttttacacacagtcatgattctccttcaaacctcatttttggtcctgcttgacaagcttctctcttgtcctttctggaaacatataaaagcaaacaaacatgatttctaaaacaaaagaggatgtcttcaaaaggaatctttagaccgcaccattttccaagtagaataaactttcaatagagggcttgcgccattgagggattctttgtccatgctccagctggggctgttatcttggaagaagccatagattttgtcttaccttgtgaagaacaatagtcactgtctgttacttttttgtacttcccagaaagaaaagaaaaattataccatgtttttgtcagggagccccaggccccaagaggggaatttcctcaaagctctcaaggaacacaagtcttggagatttcagtgaatgatcagagtgtggtgggggtcagatgtttttgattatattcttttttttttttttttttgagacggagtcttgttctttctcccaggctggagtgcagtggtgtgatctcggctcactgcaacctctgcctcccgggttcaagcaattctcctgcctcagccccccgaatagctggcattacaggtgtgtactaccacacctgagtaatttttgtatttttagtagagatagggtttcatcatgttggccaggctggtctcaaactcctgacctcaagtgatccacccgccttggcctccctaagtgctggattacaggcgtgagccaccctgcccggccttgtttttgcttatatcctgatgtcacgtggcaagtgtcctctggatttagtatgtagatgtaccatggttggtaattgttttccagaaacagccaggtagaatgaagtaaatggttagcagcaccatggttggctctctcctaggcggtcactggtgatggtttctagaagacctgctgtcttctcctttatttaagaccagggatgacaaatacacaggtgaatcctgtgctggctgccagccccctgttggagggttaacaaacttgggaatgtaaaatgctatctctgctatctcagatgctttagtgatataagatattttttatatatgcttgtttcacctgaagttggcaatgaaacaggctcatagtgtgttttataggcacaggtggaaatgagactagacgtttatgagataatctgagtatatattctatttttatgcctcagattattgttttggcctctcctggcatcctttccttggttaaatctctgacctggtgtagctgtgacaaaatggtctcattgtaatgtgctacacctttgagtggggtatctgtaaagggacttggctggaatttgctcacctcattgttttcccttgatttaagctgtcagaaggctggcctgctcgcaggcaatcagggacatggagcccaggccatagatgactgtcccttaattcttactctaaggctatcaattagagtttgctatctccagttcacatgagatagacttgaattatggtttatgcagagccttgtggaaaacgcatggcttaggacttgacttatgttaggaactgtgtcctgggctcagtggggtctgggttgacagcttctgaacagatgggtccctctcttcccagatcactgcgaaacctgctcgacggtgagatggagcactcagccgcgctccggcaagaggtggacaccttgaaaaggaaggtggctgaacaggaggagcggcagggcatgaaggtccaggcgctggccaggtaggagagggtgagggatggagaggtaagcacgtgggggcttcattaaaacctgagcatactgggccgggcacggtggctcatgcctgtaatcccagcactttgggaggccaaggcgggtggatcataaggtcaggagatcgagaccatcctggctaacacagtgaaaccccgtctctactaaaaatacaaaaaattagctgggtgtggtggcgggtgcctgtagtcccagctacttgggaggctgaggcaggagaattgcttgaacccgggaggcagaggttgcagtgagccgaaatcacaccactgcattccagcctgggtgacagagcaagactctgtctcaaaaacaaaaacaaacaacaaccaaccaaacaacaacaaaaaaaaacctgagcacacgttcacctggactttttagttaaaaaaaaaaaaaagccgggcatgatggctgacacctgtaatcccaacactttgggaggccgaggtgggtggatcacgaggtcaggagatcgagaccatcctggctaacacggtgaaaccccgtctctactaaaaatacaaaaattagccgggagtggtgacggacgcctgtagtcccagctacgcgggaggctgaggcaggagaatggcgtgaacctgggaggtggagcttgcagtgagctgagatcacgccactgcactccagcctgggcgacagagcgagactccgtctcaaaaaaaaaaaaaaaaaaaaaaaagatagcgactaaagcaaaaaaagtgtgtattttaatttaacttatttcattgagtaaatagtatatatgcacgtggttcaaaatacaaaaggtgaacctgtgcaagtccccttctcttatcccagccacccagtttgctccctagagggggtcattgttactgttcccagagatattccctgtacacacaagcagataggtgtgcatatactttttttccttttctttcccttctcctcctctctttcttccttaatgtgaagtggtagcctgtcctatgcagcattcacttgacatctcagagattgctctcgttggtctgcgtggggctgccctctgctttttaagagctcctgacatttccttgtctgactgcatcagaattcgtttaaccagcctgctgacagcgaggcaccgagatggtttccagtcttttgctgctactaataatgccacagtgaacaacctttgcattggttgtttttttcctgtatgagtatatattttggaaatattcctggaagtaggattgctgggtcaaagtgcagcgcatttgtaagtcggacagggaccatcaactcgcctggcacgggtgtgagccgcatgttctgcagcagtgtgggagagggcctgctgcgacgcagctgtgctctcacagccatgggatccaacttctgggtctctgataatgccaggggtggaaatggtgctggcagaaaatttttcattaccatttctctaattaagagtatggttgagcctccttttatttaaaagccattttatttccttttctgtcactttgtttatatactattaaagaaagctgcaaagtaaaccaccccagatcccaacttacatgcatctttactgaatttgttcatatactaacatttttctttaactatacatgtaatctatgcctgtgattgtttagtctaccttctagcactgcttaggagtgcaaaagcagcttttattgtttccatataggcctcatgttaaccatttttatgtacctggatgtggtatttgattgagtgaacccgccatattaaattgcccattccagattggaatgatgaatttaatatggtcaatttagcattcaggttgtttccagtttgtcctcattttaggaaagataagcagtttattgcttgttctgtaaatctactttaaaataagaccacgagataaacacgtcttgtggatgtgcaagggagcccagagttaagtcagtttatagcagcagcatttacctctctgtgctgttagatgctgtgaatggctctaatgtaattgttttgtatgtcttattgaatgttggcgctatgatcctatgttggatttccaatctttgagcttttcccctttcgtcacattttaaaatgatagctcaagagcatcaaagacagtttaatgactgttataaatagtgtaaaatgtgcctagttcggcattttctcacctggaccacccttttgcctggccatgctagagttttgccgcataattgcatttaatgttcacaataaagtctgaagtctttagaggttctggttcttagtcagcaaagagagacagaattatatgccctgtcttttttttttttttggatggattcttgccctgtcgtgcccaggctggagtgcagtggcatgatctcggctcactgcaacctctgcctcccgggttcaggtgattctccggcctcaacctcccaagtagctggtattacaggtgcccgccactatgcccggctaattttttatatttttagtagagatggggtttcactatgttggccaggctggtcttgagctcctgacctcaggtgatcctcctgcctcagccttccaaagtgcttggattacaggcgtgagccaccatgcctggcctccgtgtcatttaatggcttgtattagcagtcagcgtagtcttgagtctttgcatcattacttgcaaattgtgtgtttctgggtgaattgctcaacttctgcacatatgtgcttcctcatctcagggatggagaggatgatctcatctagctgaaggggctgaatgaggaggaaaagatgtgagggtgcatatggcagtggacatgagtgaggcgtcttaagtgtattccacaggaagcgtgttttagtgcatgacaattgttgggaaaattttatcccatagatggggtagataaaatcaatgtcctaaccaggcagttttataatccctatttaagcagtgggttgctaagagtttaaggtgtctgaaagtttgcagtctgtaggcagaaggaacagatatctgtaaaacagaccagtatttcaaaaggaaaaactagaagcagggaaaccgatcagctgggtatgtaagttttgaaaaattccattgctgacatgttccagatagagttaacctctgccagtggtcagaactttcttcttgcttctggccagagtaaaagcaactgtcagtgttggctgacagtggcttgctcgggcagttgttgcctgggggtggggatgccgtagctgctggggcacagggcagggcagtggagtgtcgcaggctggaaggtgaggctcattgcgccggcgccatgctttcctcaggtgtgtgtgtgtttaggtgcaggtttcacagtgcaggtggatacagctagggctttatggtccaggtgcctgccttgtactgacggggtcagaccatggctctcctgcttactagttgtgtgaccttggatgaattacttaacttctctgtttctgtttccttagtgtgggtttttttttttttttttttttttttaagatagtgtctcactctgtcacccaggctggagtgcagtgatgcgatctcagctcactgcatcctccgcctcctgggctcaagcaattctcccacttcagcctctgagtagctgggactacaggcatgcaccaccatagccagctaatttttgtatctttttgtacagacggggttttgccatgttgcccaggctggtttcaaactcctgggctcaagtgatctacccacctaggcctcctgaagtgctaggattacaggcatgagccactgctcttggcatgtttccttagttttaaaatggtaataagtaaactctttacctcatagagttttgttgaataaataaaacgagagaccatgtattggctcaatgtgcttgataaatactcagtaaatgttaactatcattatcgtttttcttaaatataataattatggcaccttacttcatcaaaagttctattttaacagcgatagtgcagaaagaattaggagctagtctatctcctactcagaaaagtgagatattcgaatgctaagtatgcgcttgtgtatatgtgtgtttcactggctctgagttcatggttgtaaaactgagcatcactgagcaaacccagcatttgattacacattccttttgctaagaattactggctttcctagaacaaggtcatgtaactagcctggtgctttttggccctgggcagctgcgagttcctgaggcagaggcataataatcatttgcaattaaggctctgtaagtcacattccttgaaataatcgattgccttgtttccttttgaattaagaaagctcaagctatgagacatatgttaaaaaagacacacatttacaggaggaaaagtggctttgaaggaagcaagtaaatgggttcttgaattattgtggggggtcattttccaattcttgtcatcgtattatggcagtgttagctcttgctgtgtaacaaattatcctcaaacttggttgctgagaacaacaaatatttatgattccccacaatttctgtgaattaggactctgaggatggcttagccagggcatcagggtctctcatgaggttgcagtcaagctgttggccagagttgctgtcatctgaaggcttgactggggatggagggtccacttgcaagcttcatcctgtggctgttggcaggaggcttcagctcgttgccacgtgggcctctccgtggggctgctcccaacacagtagctgacttcccagggtgcgtaacccaggagcaggagaagagagcgcacccaagatggaagccaccatgtttttaacaacttggccttggaggtgacacatgattgcttctgctatattctgtagtcacagtcaaccttggttcagtgttgagggaaacacacagtggtgtgactagcaggaggcaggggtcactgaggccaccttgaaggctgcctgctacactcatcaggtatctgcttcctcctggggcagatactacttgtattaatgttagggtcatccagagaaacagaccaataggatgtatgtatatctctagaaaggggtttatcgtaaggtattggctcatataattatgggggccaagaagtctcacaagctgccctctgcaggctggagagccagaaaagctcatggtgtagttcaaaggcccaagagccagagaacctgtggtgtaggttccagtctgagtctgaaggcatgagagccaggagtgccgagggcaggggaagagccatgtcccagctcaagcataggcagggagagaactcaccttctttttcttctactcaggccctgcttggaatggatgatgcttgcccacattggtgagggccatttgtttcactcagtccacaaattcacatgctaatctcttccagaaacatcatcacaggcacactgagaaattgtgttgatctagctatctgggcatccggtggcccacacacatggatatgcaaaattaaccatcacactcccccaattttccttggtggatctttgctccttcctttgtgtccatgtggtttgatggggctgtccctgccctctgcccctacagggctccagaggatggcagcccacccaggcctggacagttgggttgctccatccatgagggctttacaggagggcatgtgaccaggatggtctgataagagccagttactgcattcttgagaggatggtgccagccagttctctttgctattttgttggcagctatctttgctattttgtgaggagattctaaccccacgtgagaaccatgtggtggagaaatggagggagagagaaatcaacagttcctgatagtctcatttgagctcctggatccagtctttcctgaagctgtgtttcctctggacttttcatgtatgtgagccaataaattgctttcattccttgagccatttgtggtggtttttctccattatactcataagagtcctgactgaagaggcctcttgtttggttattagagattggagcacgtgtattttctctgcacctaagtagacatgtcatctcaacaatcaacctgccaggtccaggaaggggcttctggttggttgagagtcaccaaggtggtggagaaagtgttcctcggggggagccccttggactgcttctcagagcaccgctccagacttcccttcgtgtatgtcactgggaccggcctcgcagttactcttctgtcgtgactcagagtgccgctgcagacttcgcttcttgtgtctcactggggccagccttgcggttactctcctgttgtgacttttccctccttctgtgcagttctgctgcactcacatgaacatgttgtcagtggtatggccggggccattctcttcatgcttctgagcctctctggttctttaactatttagaaacttaaagtggggctggggtggcatggaacactctccctccttcctcccgtgcagtggcataaagcaccctgttgatgcgtcatggtcactgctggctttggagggccgtgtccgacccttacctagggaagcagcacagcacagtgattctggtcttggctctgccacttggtaacttcttaattctcagtttccccactgatgctaacatgcctttgatggcagaaacccacaccaaattagcttgggtcaccaggggatttttttcttgcagtagctgggaaatccaaggacaggtcactttcttcaagcactgtgggacccaggtcccccaatgacaccagtgcactctccatcttcccttggcgccgccctctgcgcactggtgtcatgcttaggaaggccctctgcatagagcaaagatggcctctggtagcactgagactcgcacaggatccaaagggaagagactctttcctaatgtctgtatataacattttaggaaaggtttttgttgttgttgttgttgttgttgttttgagacagagtctcgctctgtcacccaggctagagtgcagtggtgtgatctcagctcactgcaacctccacctcctgggttcaagcaattctcctgcttcagtctcctgagtagctgggattacaggtgcccgccatcacgcctggctaatttttgtatttttagtagagatggggtttcaccatgttggccaggctgctattgaattcctgacctcaaatgatccacctgcttcagcctcccaaagtgctggtattacaggcgtgagccacggtgcccagcctaggaaagactttttagcgggcatgttatggctaagagtcagcagagggccatgattgacagtcttaccaggtccccaaggcaagcagcgggcagcaaaagcatgtctcttgcattttttcctaggattgttgggacggttacatcagctgaggctcctaagcactcagcatagctccaggccctcagtaagcgctcagtgaatgtcacctaatttcttcttcttggctggtgtcttggctgtaggtggctggggatgctgaggcgaggccagaatctcttgggccctttccttgtccaagcctcccctgcagtgagcatcttagagcccttggcccctggccttcacttgaccttcagctcctcctggtgttatttttccagccctgcctgcccagtgtgtgtccctttgtttatttgtccctgctgggctgctgagcagtgagaacttccttgacagtgttgtgcatgtgagattgagaactgtactgtacatcctggaatggccttgggagccctgctcagatcatgctgtcctgcaccccaggcgacctttattggctttctatgaaggctttaaatctcacactccaccctgagggtcagcctctgccttcctttgcttttaaatcattggagaaatatgaagactatgtcctttgtaaaaaaggacagtacatttcttcagtgtccattcaaaggcactgattatatttttatcacaagagtcaaatggtgggaattgagaaggtcaggcatactgatttgaattatggggaatactggcttgaattccagcccagcttgggctagggatggcctttggaatcaagggtgtgggccttttcattgctatctccccagttcagaacacctgctctggcgggaaaagccagtaggcttcatcctgctgccaactctggtagtcgctgcctgggattctggctgagaaggactggagtgctgtcaggactcaacagaaaagagtgttgttattgattagcaatgtctgccatgcccatgggaaggggatgtggtagcaagcctgccaagaatttgccatccatatgctagcacttctggagtcttggaaactgcttgagatgaggtccccaggccaagatggcagcattgtacacgagactgaaaaaaaaagaatttgtcactctttttttttttttttttttgaggtggagtctcactctgtctcccaggctggagtgcagtggtgcgatctcggctcactgcaacctccgcttcccaggttcaagcaattctcctgcctcagcctcctgaggagctgggactacaggcatgtgccaccatgcccagctcatttgtatatttttagtagagatggggtttcaccatgttgtctaggctggtctcgaactcctgacctcaagtaatctgcctgccttggcctcctaaagtgctgggcttataggcgtgagccaccatgcccaacctgtcactgttttatgaagcccacattattatattctgcttggtaaaagaaacatgctttggaggaatatcttaaattcataatgtaaaataaaacaaaactttgctcttaggcttagtagagaccagaaataagacccagtttttgttacatgtctttcaaaaattaacatttgctttgttatctgatttaggaagcctgtgtttatggatgagaggaggggaggaagagaggggttctttcactagaagaagagttgctgtagtggacatggtattatcactaggctgctggcaaaaggcaccaaagctgcctcttgactttctaggtatgtaggtgagtaaactttttttgttcaagagagtttgagtggggctttctgtttctgactacaggaatacagaaggctttgttggtcaggcacggtggctcacgcctgtaatcccaacactttgggaggccgaggtaggtggatcactgaggtcaggagttagaggccagcctggacaacctggtgaaaccttgtctctaccaaaaatacaaaaattagctgggtgttgtggtgtgtacctgtaatcccagctactccagaagaataagagaatcacttgggcccaggaggcagaggctgcggtgagctgagatcggccactgtactccagagcctgggcgatagagcgagactctaaaaaaaaaaaaaaaaaaaaaaaaaaaaagggaggaaggctttgtgcagcatctcctgcctgatcgtgagaccgatcaggtccctctgagatacgcttcatgggagtaggtattcctgaatagcgttattactgacagtcacagtccgggttgtcatccacgcactgcctgtcttcccttttagactgtgcgatccatgagggcagtggcccgtccttgcacctagcacagtgcctggcattgctcagtcatattggctaaatgagggattgaagggaccgtggggccagtgactgtcacttggtatgagtgtcactgagaaatgtcaattcttccagcaccttaattgttctcctcctgttggcatcttctcttggcacaaagcagccagttaggctgggctttagacctgtggatggtcgtttgccccaagatgtatttttagtcattttctgggaattggggctttctggaagcccctcagccattcattgaaatcttaccatatagaggccaggtgcagtggctcacgcctataatcccagtcctttgggaggccaaggtgggcagatagcttgagcccaggagaccagcctgggcaacacggtgagaccctgtctacacaaaaattacaaaaattagcggtgcgtggtggtgcatgcctgtggtcccagctactcaggaggctgaggtgggagaatcacctgagcccaggaggtcaaggctgcagtgagctgagattgtaccactgtactccagcctgggagacagagagataccctgtctcaaaaaaaaaaaaaaaaaaaaaaaaggaaaaggaatcttaccacttagagtcagtagtaggtgacagaaacccaccctaaactgcctaagaaaaagagcagttgattcgctcatgaaacttaaacctacaggagaagagctagctttttgctgggctggatcaaagctctcagggggtatcacgcatatcatgcagtccccatgactttccatgtctcctctctctttccctcggtcttggcttcattcttaggtaactcttctcttgtggtgacaagagggcccccaggggccccagcctaaatcccatcagtttaacaatgccagtgggaggagaagacttttttccagtagctctggagaagtcttgggattcactctctcatttcccgggccagctgtgttacttttcctgcccaagcctgggtcccattccccctggagctgggggtggctggctttccctcacctgaactccgtggagcaggaacaaggatggaggagagtttgcttaaaaggaaaaccaggatgttcctcccatcagattgggggtgcatgcggtgaggtgcagcctgcagatgtccctgacagtgggttgcttccacagagggcttgtgacgcttggattctgtccattttccagagtgacactaccgtgctgtcactcttgtgccagctgtcttgcgcaccctgtcttggtgggtgaaatctgggctcagccattctaagcggtagcccgaaggtctctgtgctgtgttctccattgtgcttttccttggctagatatttcggtctgatataatctgacattattagcaaaccgctggtccagctactttggcatatttggacttgatcttagaagactcaatatctgttttaaataaaaatatttggtaatgcccccttctgaaatgaaatttatagcgaatataacctacttatacaagtaatttaaaaaatcagtataacactctaatatgaaagagaaatgaaaggaatttataatacaaaatagatttcagtacatattggtctggcgcaactgtgctagaaaacatgctgacgctaagtgcttgcacctccttctcatggatgagttttgattttaagaagttaagaagatcagaagtcattctttagaaggagtccagaaaaagagcagagagtgggtgaaccgtaaagtaaacctggcatagtcagtatatatgaaaggcattcctttctaggctcagattatgagtaaggtttccgcctacatgaatggccacaggacgattgaagtgttgcaggaagtaggctgatcttggttgtgtggtactgccttggcctttcaggacagttagtatcctcggctctatgctgtaaatgctggtagtgctaatggaaaggggtcttgattcagatcccaagagagggttgttggatcttgtgcaagaaagaattcagggcaagtgcttaaagtgaaggcaagtttattagagaaagtaaagaagcaaaagaagggctactccgcagacagagcagcggcatggaccaactgacttagagtacttatggttatttcttgattatatgctaaacaaaaggcagattattcatgagttttccaggctcggggcaggatttcctggaagtgacggttcctcccacttttagaccatgtaggataacttacggacattgccgtggcatttgtaaactgtcatggtgctggtgggaatgtccttagcatgcttatgcattctaattagcacataatgagcagtgaggacgaccagaggtcacttttatcaccatcttggttttgctgggttttggctggcttccttacagcatcctgttttatcgtcatggtctttgtgacctgtatctaatgacaccagtcctcctgacctcccatctcatcctgtgactaggaatgcttcacttcctgggaatgcagctcagtgggtctcagcctcattttaaccagctcctattccagatggagctgttatggttcaaacacctccaacaatagcactcatcatcctcgtgatgacccagactgtccccacggcccccagtgagaatctctgctttagctctttcccaagtgttctctttttcaagaccatttacaaatgtattggaattttgtgtgcaaggtccctttcagttgccccgatctttttgagtccttgtctagagactggatccagtccacactgaacccactgttgagcacctgctgcatatgtgacccactctggctctcccacctctcgcctctccttgggcatgaagcttgcttccccaaggtcgctggctttttcccttggctgagtctcctgagctgagtgagttgtgcccttcgccattgttaagcacatgcttgtcagcagctggctggtctcatgatgtaccccagagcagccaaggagcgttgagtgcatggggtgggtggggctggtgttgggggctgggggtgagtacaagatacacatgtcagtcaagagggaatatggcttaggaggagctgttttcctgcagtttgatgctactgatgaaattcagtcaagatgaacgattgatattgtttgtttgtttgtttgtttttgagacggagttttgttcttgttgcccaggctggagtgcagtggggcgatctcagatcactgcaacctctgcctcccgggttcaagcgattctcctgctcagcctcccaagtagctgggattacaggcgcctgccaccacgcctggctaatttttttgtatttttagtagagacggggtttcatgttgaccaggctgatctcaaactcctgacctcaggtgaccactgcctcggcctcccaaagtgctgggattacagacctgagccaccgcttctggccgatattgtttatttgttgattcactcttcaaacatttactgttccgtgtgaagcttagtcaatcagagagaaacacaatacagctgattctgtcctgtgggtgctagaaattgaagggaaggatatgcaagcaaagaaaattttttttttttttgaggcagagtttcgctcttgttgcccaggctggagtccagtggtgcgatctcagctcattgcaacctctgcctcctgggtgcaagcgattctcctgcctcagcctcctgagtacctgggattacaggcatgcgccaccatgcccggctaatttttatatttttagtagaggtgggtttctccatgttggtcaggctggtctcgaactcccgacctcaggtgatccgtccacctcggcctcccaaagtgctgggattacaggcatgagccactgcgcctggccggccacaagcaaagattttaaccttcagtctgacagctccaggagttccattttcgtggggctactctgagcaggaagtgtcgtatggggcaggtgtggacttgagtcctgcttctcagggttagggcaagggtgagacaagtgaggcacctacgctgcttaatttaaggcggtgctcgtccttagtgtcatgcaagggcttccaccgctcctagatgtgggatctgagatggccattttacctctcaggctccctatctagaaaaccacggtggtaacagaccctcccttagagagaggatgaagagagattgcatgtcaagggttaagcacattgaataccctgcgtaagtactgagtaacagacagccatggtgattactgttggtttcatggaagtaaattatgcctccatttcaagcctgcaaaaagtcattctctgcagttaatctagcctgctgttgctcagatgtaactagcttcctaataaagaattctctgggttgaagagcgaaatatgttgcttaaactttgctgaacatcatagtcacctggggagcttttaaaatggttatgtccaggctgccctccagaccaattaaatcagaatctctggagctgaggcccagactctcaggtaattccagtgtgcagtcaaggttgacaactggtggcttagagcagagtttctcaaaccttaatgtacccacgaaacacccggggctcaggttagagattaaattctcattgagcaggtctggagtggggcctgctatcctggagttctaataagctcccaggtgacactgatgctgctggttcctagaccacacattttaagtagcaaggacttaagagaggatgccagcaatgatctgaacggataagctcattgaaaaccttagaaaggctgatttttagctcagaaccaagttgggagctaattttttgttgcttggctggtttgaaaaatataaagaatagtatgacccactgcaacaattagcactactaacatttgtcatttttgttttagattttatttttaagtaaaccataaacaacatgtaggtttgtgctatggttagaaggttgtccctctaaaactcatgttgaaacttaattaccaagcaacagtataaaaaggtggtaccacctgagaggtgattagaccatgagcgctccaccccccatggaggggaggtgcgattcatgctgttataaaagggctagctgggctcctttttccgttactgccttctgacctatgatgacgcagcaaaggtcctcgccagacgccagccccttgatcgtggacttcccagcttccagaactgtgagaaaagaaatttctgttcattataaattacccagcctcaggtattcggttatagcagcacaaaacagactgagacggcttgctttgtgggtatttatttttttgagacggagtctcgctgtgttacccaggctggactgcaatggcgcgatctctgctcgctggaagctcctcctcccggattcacaccattctcctgcctcagcctccccagtagctgggactacaggcgcctgccaccacacccggcaaagtttttgtatttttagtagagacggggtttcaccgggttagccaggatggtctctatctcctgacctcgtgatccgcccgcctcggcctcccaaagtgctgggattacaggcgtgagccgctgcgcccggcctctttgtgggtttttaaggatctgcctctgagctttcaacgtgcgcccactgttctgcaacttggtttgctcacccaatgtaaagctgaatggtttcagattaagatatacacaagtgggattctaccatggaattctgccatacctgagatttcttgagggaactcttgttttcatacttaaaaaaaaaaaaaaattacctttaaattgtgaaagcagcataacaactcaaaatggggaaaagagtcccaaatcccatgactgtagcgtgataattatttccattcttagtccacttaagtatatttttacatagttacaccactgtttgttgtgtacatgcaatttacattctgtttattttattctgttgctatgtagatttcaaattatgtttaaatacaagattttttttccctgttcataaatgtaatgtgtacgttcgaatccttaaggtttttcccttaagttagggtatttttcccccctgcatatgaaagtaatttgcaagttagaattcttaagtccgggaataccagaaaagtttaaagaggaaaatcacctgaacacaattaccatcaatgaatttattatttatggggcattttattccagtttatttttatgcatatatgtattttatataattcaggtcattctgaatctataaattgagggtctactttgaaaagttttttattacaataatacagtaaacaacagacattgtctcatgttattcagttccatggatgtcacttgatggctttgtggagttctgtgtttggatatgtccttgtttctcacatcatttttcttaaccatttttttcccttgtaggattagtatttctatgaacttgtatttttataaacctattccgccttttaaaaatcatttccttcagctagattccaaaaagtgaaattcccatgttagaaggtaagcatgtttgtaaaggctcttgatcttgtgttactaaaatcctttccaagaaagcggcctctcttttacccctacagcggtgagtgagagagcctgaccagctgtgatttgtaacggctgtgtagcattccttagggtacttggtggtttccacctcgatttgcattgcagctgcttccagtgtgagcttatagataaaggctgcagtgactatctcagtatctgtgtgtatttctctgtccgtttctttccttaatgtgtatttccccaagtgggatctcagggcaaagtatatgattttttttttttttctttttgaaggcagagtgtttccctcttgcccaggctagagtgcagtggcacaatctcagctcactgcaacccccaccttccaggttcaagtgattctcctgcctcagcctcccgagtagctgggattataggcacgcaccatcatgcccagctaatttttgtatttttaatagagatggggttttgccatgttggccaggctggtctcgaactcttgacctcaagtgatccacccgccttggcctcccaaagtgctgagattacaggtgtgagccactgcacccagccaagagatatgaatgttttcatggcccaagttcttggcggcaggctgaggtgggagggcctgctcatcagaaatggagctagttctactaccattcatcactgcttggctcctgcatctgtggctgtggaaggtgaaggtatccttggcatgaatgatttctcagctcgtttttcttttgggattaatgatgtgggactcccaaaggtgggagaatggaaatgccaaatgctttaatgttgaaatttaaaataatgggagcaccttctcaaacatgaccaacagtggaaagccatataaatttcttcatgagcctttcagaattttgtaaccagtataggtttcctagatagttttttaaaatataaaatggtagacacagcataatgggagaggaacagaagcttggtggcatctcagagcaatcacgtacaagggagaaagccatgtgcttgtttattttctctaatgcttctagaatccaatcaaagactcaggttttgttgacgaactcaactttttagggagcaagcagcaaggtatatttgcatgaacatctgtgttttgaagcgcgtgcccgcgttgaatggttgagcgtcagagtcattagtacccaatgccagatgttccctgaaaaatctgcaccaaacacagacttgggcagttcatcaagatgtgaaaaacatgcagctgttaagggaaaagggagaaggttgtgtctgaaatgttgctccagcccatcgctttcccccatcaaaggacagaagcaggaggaaataaaaaaaaattaccaaaacccataaatatgacagaactcttatgaaaaggttacggtaattattcaccggggagggaaatgcttttcccattcattaatgcttcatttcttgtcttttctaatgagaagtaggtagaggtgtctagagagaaagaaaaatagcagaatggttttgagggataccaaaagagcccaggaaaggtgaacaatgggaagagaggtgtggccactaagtaaatgctggtgtttgagttacttccgagaaatggttggaatgaaacagctggatgtagccgatccaaggagccgcagcccgtggctcagtttaacccccttgactttccctctttgcctccggagaggcagaatttgcagcctgattattcgtagaaataatttttcaaatcttgcctttccggtacggttcacaaggtggcaatttccatgtcactgaacatgaggcctgggtcttaaatatagccaggatgtgaatgccctgcaggcggtgacagtggcaatgtgacatcactgccaagcaacttctttttattttggagcctgggaggggaacaacaggaagctgggcagaggggagatattcttggcagcagcagcagcgatgcagtttaaagagagacaactgtcaaggctagtgactgagcaaaccagagttcgctgaattcgtactggtgccaaacatagccgaagcaaagatgtgtgagactcgtacctgctgctgctcagctccagccaccaagtagccatcatgaaaatgttttattttaagcagaagaactttccttcaaatgcattcttacttggaagctctctgagacccgagagagctccctgagagctgagccacacaggttaaagtggagaggtggggtcctggaatgccacccatggagctacaaaatgccctttgttatccatgttgaaaaggccacttaaaaatggcgacctagcgtgggataggcttgcctttgagcacattccctcttgtttctggtaatgtgagctaaggagctgttagggctgaactaaatccacagatggtctctgcctctctttctgtatctggcaaggctctttcccaagtttgttagggagttgacgttagctacatcttagtagatcttgtttttcttgtttttcactcatttgtacctcagattttcttgtccaatctccccctcccctgcatgattagtccctcttattttgcttaactttttcttatttccatagcatttcttgttttctaatacatcacttcttagattcatgatttatcactgccttttggtcttaagttttaagcctcatgagggcaggagcctttgtcttgttttattttattttatttttctgaggtggcatctcgctcttgttgcccaggctggagtacaatggcacgatcttggctcaccgcaacctccacctcccgggttcaagtgattctgctgcctcaacctcctgagtagctgggattacaggcatgtggcaccatgctcagctaatttttttttgtatttttagtagagacagggtttctccatgtttgtcaggctggtctcgaactcctgacctcaggtgatccacctgcctcagcctcccaaagtgctgggattacaggtgtgagccaccacgcccggcctgccttcgtctcattagttcaccgatagatctattccaaggagcctggacaatgcctggcacataatagagctcagtggatgtttgttgaatgaataaatgagcatttgtcagttacttctaagttgttgttctgctgtgtttggcttatgtttccaaggtgatttcatttcatggtctaaagtggctgctggagccccagccctgacacctgtgttcttggcagcaggaagggtaaagcaggagaaggggagaaagtgtgtgccaacttctcgtacagaggttaccgcaagtcactcaaacactttctcttacttctcactggcctgaacttactctgctagggatgctgagaaatgtgatttctgttttttagtggagcacattgtcactccaaataaaacagaaggcaagtagtggtctgtgcttagtgcctggtacatagtaatctctcatgaggaaaattcacttgttttgttacccggggtcatgagggagtatatgctctgttctgtagtcgtcagtagatcagattgtccctatagtgattaacaaatgaccttttgattcacaaagaccttgactctaatccctgcagtaagcacttgctagcattgtgaccttgggcaagttactgtacctctgtgagcctccgtgtttaaaaatcatgaaaatgggaaaaataatagaacctacctcatgggtattggtgaggattgaattacataatgcaggtaaagaagtgtggggctgctgtctgagacacaggaagctaataaatgaaggcagttctatatcatcctatgatctttaccagcctcagtcaagtatggtttctaggtgctcaggactcaaggatcacagagacatccttctggaagttcccagagtgcactccagttagaacagtttgtgccaagggggagaggcatgaaggaagatgctgtgtcaaggaagcttcaggttgctccctgtggctgtatcctggaattctggagtccagagtacgtttggggaacgattgagggtggggtttctgcaagggtggcctgggaacagattcccaaggtcccaatgaggagtttggcctcggttctgtggatagtgggcaactattgaaggcctttaaggagggggagtaattgatcagatctgttcgagggacagagccataatcccctcctgggcattgtggagaagtggataggaggaggccagggtcggaggggctggaagttctttgagctattcaggcgagagatgatgatggtcagatccaaagcagggtgaatgcttctagagagagagactgggtagatcaaccatgataagtatgattccagttgtttggttcttggattagagtctgtcttcccggtagactttgctaccaggggttaaggatggataaacaagatgtgaatgaattatttgcctagctcctcaaggtacgaggccagacctaacccaggccttcaccagcactggcgtcttcagtgagattgtgccgcctttgttaacctgagtcattgaggagcagaccttttgaagagtgagtctgcatcacagctttaacaacctgagccctgtggcaggtaattgtgaccaggaacagcgtctaatgagctaatttttgtccagtgatcacatcttgagatagtgtgcgtgagctgcatccctttgtaattgccacggtcacagtatcgggaggccccaagtccgtgaggaggaagttgtctttgggtcaccagcaaggtcacagcctgtggtttgggttcatttgtgcagattggggctaatttgtttttgctcttttatctgaattggaaattgctcagccaggcaagagatacggtcatttaacagacagaagcgctcagatggaggagggtatgaggccggataggacccctgttttcctccaaagttcatggttactggggatgtgaccttggctttcagaggaccttcccagcaaagatacctttcccctgtctgctgtatggccacagagtcaaaatgttaatatgtttgtttctgctttttatttaaaaatttttaaattatggaatttttcaaacatgaacaaaaatagatggaatagtgtaacagcccctgtgtacccatcccccagtcttcgcagttactcacttgttattactcttgctttgctgagcctgttacactctctgctttgttttttgcttaacaacttacagcaagtcctagatgttacatcagctataaatacttgcttatatatgaatctcttacagtaagacaaaaaaattatcaccacacacacactattacacaataaaattagcaacagtctcttaatatctaagttcaaagttccttgatggtcgtttacagtggctttgtttgagtgggttctgattttacttttcaaagtgttaagtcagctcatgccattcttatgtgtacaacactccactgtactcagaaaaaaaagaatatccacccttctttccctggcctgcatgttctgcgtgatctgaccggggcctgcctgcttcctgttaagcatcttcactgtttgttctgcccgggactcgtaccccacagatcttcagatctttgcaggacggtttcttttcaattcctctgaagagagggtggtcctccacctcagtcatttcccctcctcattatggttttacattttctcacacaacctactcttctacatttatttgtgtttttttgtttgtttgtttgttttgttttttgagacagagcctcactctgacacccaggctggagtgcagtggcacgatctcgtctcactgcaacctctgcctcccgggttcaagtgattctcctgcctcagcctcctgtgtagctgggattacaggtgcacatcaccatgcctggccaatttttgtatttttagtagagatgaagttttgcctgttggccagactagtctgaaactcctgacctcaggtgatcctgaggccgaggcaggcagattgcttgagctcaggagtttgagaccagcctgggcaatgtggtgaaaccgcatctctacaaaaaatataaagaaattagctaggtgtggtggtatgcgcctgtagtcacggctactttggaggctgaggtgggaagattgcttgggcccgcgaggtgaaggttgcagtaagctgagactgtgccgttgcactccagcctgggcagcaaagcaagaccctatcttaaaaaaaaaatgcatgcaataatacacatgaaaagattcacatcgtagaatctttggtttctgtgatacttttctgttaagaggtggtaccaagcacatgttggaattattacctcccacatccagaccaggtaactggtttacagattgggaagatgggacacctgcagatggtcatttcaaggtttggcctcagatgggcatgtggggagcaggagacagtgtggcttcatggaaactgccctgggctttgcattggggtctttggaaaccctgccctatcttagctctgtaacctggaacgcgttgctttccttctctgaaccccagattcacccatcaaatggggcaaaccaccatcttcaaaccagtgagagacacggtgtttctgaggctctttccattttcctgcagaaaaagactgacctgtactagtagcaactttgctgaccagtcaggctgagagatgaacgcagtacatacaccacaggtccctggaacagatgccactaattcattattgacaaaacataatagctctattattttttacattttccgggtgttttctgaacaccagtaatggttctgtctcacataggtcagctaagttaatcgtcgtggttgccagtgagcaaggtccttttgtgttctcagttcacaagagggtgacaggctaagaagcttgctcaggaccccgcacacagtggcagggctggaatttgaatgcagactctgctagaacgtcccctgccatccatccatcatggtcattagggtggtttttatacttggtgattgtcagagtgtctctgtagtcgtgtctattactatagctttcttttgtgccccagccttggctgtttttagtcaaggataataattgtttaaaaagagctgggcactgtggctcatgcctataatcccattgctttgggaggccaaggcaggaagatcgcttgagcccaggagttcgaggttgcagtgagctgtgattgtgccactgcactccagcctgggcaacagagcaagaccctgtctctgaatgaatgaatggcacatcctttatttttagctgtacagagggtcatgacatcttccaaaatatcgtctaattcagagccttccatgttggtacccactctggatctcttggccggtcttgtgtacagtctggaggcccctggggagatccccccatgttttttctttctctcacgctccctctgaatctttgtctcaaaaaaaaaaacaaaaaacaaaaaaccaaacctctggctctgttgcccaggctggagtgcagtggcatgacctcacctcactgcagcctctgcctcctgggttcaagacattctcctgcctcagcctcccaagtagctgggattacaggcgtgcaccaccacacctggctaatttttttttttttttttagtagagatggggtttcaggatgttgctcaggctggtctcgaactcatggcctgaagtgatccatccatctcagcctcccaaagtgctgggattatgggagtgaaccactgtgcacagccactcctcctaatctttatggtgagctttttgaatgcagctttttccagaaagttttatgtagcaagccggtgtgacaggaagacaaattgttgagctttaaattgaagaaaaacagaaggcagtttgtctgatgtgttccagttctgttcttctaccttcttcaagtttgaattatggagacggtgtcctcccgctttgaaagttaaactgctgggaggtattttattggggaatgttctattaaagcattaagaacaattagatgtaaagtcctcttttatttttatggagtttgacatacaaataattagaagtttgggttttccctctctccctaccttccttctctttccttctccctccccaccgaccccacctcttttttccctttcttccttaagggaattctaaaaccctggaatgaagtgcattttgggaagaatttggtagcaggctttctgtaattgcccacagaaggagaaaaaacacatttacctatttttagaggtgaaaactgctcctccaggcttgagggcttttctagggcaggctgtcccccgttctgagaccccccacagtgggagctggcttccctctcccctctgacacccctgaggtggaagcaggctgttttttttggagattctggcaggcttttctacctgtcacagcactggctgtggttcctaattacatacgtgtgtgtctgattagggtctgtcgcccctattagactcagaatcccatgagaaagggtgttctggcatttcccccgtctccaactcttcatcctcaggcctgaactctgtctttcacccacagcaggtgaccggcaggtgccttagtccatccgggctactataacaaaacaaaaagtaccagaaactgggtggcttataaacaacaaatagatctctcatggttgtggaggctggaagtccaagatcaaggtgccagcagatgtggtatctggggagggcctgtttgctggttcatagatggcaccttctccctgtgtccttacatggtggaagaggtgaggctgctctctggggcctctcttacaaaggcacgaatcccattcataaagggctccaccctcataaccataggctctttaaaatgccgcacctcctaatatcatcatcttggaggttagcatttcagcatatgaatttggcagtggggagaggacacaaacattgagaccacagtagcaagcatttaggcatgaagaatgtcacgggaacaaggcttggcttctcattctgcctcccaccccccttgcccttctgccagtggctgcctctgctggatgccttgttctggacttcttgcttgtcctgcccccgttggttgccccaccaccccttccgcgcccaggggactctggctcttgttgctactctgcagaccaggagagaaaactccatcccaggaggaaatgtatttggttagaaggtttgtaacaatgtaattatgcagctgagtgtgctcaggtatattctatgtattaagctgatagaaaaatcctgtgttaagtcggtggattcagaagaacaggcgcaatttagcaagccactgggaggagcagctcacgtgaagagccacagaatgtttctcttcttgagagcacggggatgaggtgagccagggacatggtcattaacaagtggaggaggggatttggcttggttaaaggaccctggactctttccattgcctcagttacaggccgttttctcagggcaatgatgttttcattagaaaagccacagacacactgagccaactataactggggaccaaatgagaggccgcttttctatgctagctgcctcttgagggcagactgtggagttggagatgcgtttgagtagagggtggtggcatgccgagatggaaaatgaaaggggtagatgcagctgggagtgtgagagcagggagggcccagaaccttctgcagttcatcctcctggagagtctacaaccaccatgggttcactaagtgatcgtgagtcccagggcctgtcttgttccagtgacactgctgcaaggaagggtcccatgctagagatggctgggcccatcctcatgagatcactcctctgctcaagatcctgcagtggctccccacttccttcgaagtaaagccaaagctggtgagtggtataaaaggacttgacatgatgcagtgctcccatcatctctctctgctcctccgactcctcctcgtgttcatctgctctgggcatattggtctctttgctgttccttaacgtgcgtggcgcacacccccccacatctccttgaagccttggctctaacgtttctctctaccaagaccctcttcccccagagagcttcttggttaactcccttgtctctttctaatctattttattttatttttgagatggagtcttgctctgtcgcccaggctggagtgcagaggcgcgatcttggctcactgcaacctctgcctcccagattcaagcgattctcctgcctcagtctcctgagtagctgggactacaggcacccaccaccacacccggtgaatttttgtatgtttggtagagatggtgttttgccatgttggccaggatggtctcatcctgacctcaggtgatccgcccacctcagcctcccaaagtactgggattacaggcgtgagccttgttggcccagccctcttggagtcttaggaaggggcgcaggttgcctgggtttccctccttgcctcttcctgcccccagagagcaccatgaagcccaatgaaggtggatatggggcaggagctcgctggggctctggtgtgcaggaaggtttccctgtttgtcttcaaaactgattttgtaagtgctgagagccgtgttttgtttctctacctctatggcctcatctgcaaggcaggcctctctaggtccttagcaaatggctgtccagccgacttggccaaatgaatgaattgattctcagggctgtctgtttatccaacgtcaggagaatgggagtgcaggagcccagggcatggtccctctgggcactgagtttcctcgtgcccccctcccctggagctcgggtgtgtgtagatgcatgaccaaggaccagggggcattttcacttctgtggggtgggcctgccgggtggctgggcagggaggcccctgttttagtcgtgtttctcctgggagcagagcctgtgtcaggggcttggatttaggtgcttctctgggagctgatcctaggaagctacagtgagggagccggagggtgagaagggaaggaacggcagtcaggaaaggggatttcttgagatggctgcaggtgggcagccggagagtcccccgaggagtgtggagaacatgcctcgcagtcgcctcggaaggatggggcattcatccaccaacatccaccccccataggctgatggttgtcccctcaaggtgctggctgtctccaccctgcttccacactatccagcagggctggtccccttctctggctctggagaaggtcctgagggcagcacagggcagacctcatggttatggaggtgggagtgagtaggcgatgtgcacacactggccctccacagcatgagggcgagaggtgagccgagggcaggggacgtggggtcatgatgtctcctaaaggaacttctcttattgcccagggcgggaggtttcacagcagccgtttcctgggtgtcctgctctcccagagtgctctgcagtattatccttttacctcaggccactgtgtagcaccatgtaaagggtcttatgcctttacattgacacgattggagcctttgaaacgtggttatgaagcaggcttgattttctgcatttttcagatgaaaaagcagagactggaggtttcctatcttggtcaagttcatgtgagctcgtaagtgaagaatccaggaactgaattcctgtccctgaccccaaattccttgctgggagggcttgagtggtgccctattccctacactatgaagtggagacagtgtgcagggccattctctgaaagccctttgtgcctctgggcctttgcatgtgcttgtctccgtctgcccgagggctggcttctgttcatgcatcaggagccagctgcagtgtcaccacctctgtgaaggcgccgtgattccctccagtgcttcatcctttgtgttttcccagcatcccagacttgtattataattcacattacatcacagcatctggtataagttctcaggtgctaggtacagtgaccaactccagctgaccgtgcatgagttaaagcgttgctgctgcttttttttttttagagacagttctcactctgttgcccaggcttgattgcagtggcgccatcatggctcactgcagcctctacctcccaggtagagcacttttaatttttttaatttttttatttttattttttgagagagggtctcgctctggcacccaggctggagtgcagtggcgcaatctcggcttactgcaatctccgcctccagggttcaagtaattctcctgcctcagcctgccgagtagctgggattacagacgtgcgccaccacacccggctaatttttgtatttttagtagagatgagggttcaccatgttggccaggctggtctcgaactcctgacctcaagtgatccacccacctcggcctcccaaagtgctgggataacaggcgtgagccagtgcacccagccggttttaattgtcacagatgtgggcacccagtagtcctgcttgaacattctcacatattttgtggtccatttgcctaatgattcataagtgcctcacaggccaagctcacattagttcttttcttgaacattgatatgatgcctcacccaggctgtgggccaaaaggacagcgtggcatgatgaaaagaacatgcaacgtgcaccggagactcggggtagcccgagtggaaccctgctccctcatttcctgccgtgtgacctcaggcaactttgagcctgtttccttatttgtgaaatgcggatatggggattgagtgaaatgggggaacccttagctcagtgcttgtctgtttaagtattgacttctgtcccactttctctagttagtgcccagtaaattgttgacttgatctcaactcagaacgaggatctttgcctgtggcgtggaatcatttctccaatcatggagaatgggcggagaatgagatttgtaacacacctgcctgttagttttagatgagcccttctggaattaatatggtgtaggcttgggtagaaagcacatcttgtgcataactgcattatcttagcaattagctggaatgaaggttccatgtgccctctactgaggacacccgtctaacaaagggtttctttggctcccagcaaggctggcacccctgcagatgtatgacgatacccagccaagttgatctctctgcctaatccctagttccagggatagcctgtggagcattgtagggagttggcttcattcctcacccttccattctttcagagacgatggctcagcacactgtatgttgggctgcttctcaagaactaattcccagtaactagcaatcccagtattgagtagatgcaagatgattttgagaactctcgctgttctgtttctaggcttcaacttcggatatcttggaccaggcgtttctccctaaagcttttgctgaagtttcaccaaaggattttatgagactgtaggttccatggaccacatctgcatagagacatggctgtgtatttcacaagtaggagaatagaaatccccactggggctgggcacggtagctcacacctgtaatcctaacactttggggagccgaagcaggagaatcacttgagcccagaagtttgagaccagcctgggcaacataaggagaccctgtctctattaaaaataagtacatttagaaataaaaatataaaaaggaaaggaaatccccagtaggactgggagaactcatacctcatgggtagtgggctcagtggccttggtgaacacttaagagagggacaggaagtacaaggtcctttgctgctactcccttatcccgtgcttttgcagacattactaatcaatcactgcactctttgtagccctagaatcttagaatccagtgcatctaggcagccacttccagtcataggcaccaattttctttactgaaaatctattcttcacctctcttgtctctgggaactctaagtaagtccctttccaaaagcgcaggctagtcagatgtctctaacaaatggttctagggccaagtgggaatgatgagatttgccacagcagggaatagcaccgtgactctgatgttgccaggtgtggaaatgatgctggtgaggcctgggtggtggtctggatgcccactgtttgccccattgctgggtctgctggaccccacgaactgcctccactccactttctgactgtattcatgttgctgaggggcgtcagggggcatggtaggagtagatgttaggtttttaacatgaggaatcttcattttagtttagattcaggatctttcagccctctgagtctatccccttggttacatagcagagaggcttatgtgctctgccaattagcccaccaactttagaaggtcacagccagaaaaatagtcttgtgctaatgatttaaaaataacttggtgttattatatcattccattcctgtgaaacatctaggataagcaaatttctagagacagaaacgagattagtggttgtcaggggccgtggttggggtgtgggtggttgggagtgactgctaatggatataggttttctttttggggtgatgaaaatgatctcttcatagaattgttgttgttgttgtacagtcttgcaaatatgctaaaaaccactggacatgcactttaaaagggtgaattatatcttaaggaagattagaaaaaagtaaggagattttgtacaaaataaaatcaagtgttaataacagctactactgagcacttaaaaacgtaacttcatggcagaagtgttagtgctgtcccccatttcttgatggcattatagcatcaatgtctggactgtgggagctttctcttttgggtctgaaatattgagatcttgactgctttcacttctggccttgtgccgggagtagcgactgtatgtgtgatttcgagatatgcaaatcatcctcttcttgctttcctgatttttctcaggattgctgacatgctacagctgatcaaaacccacacccgagtacatttttgacagagatacagtgatgatttcatctttcattttcacctccctctatcagtcccgcaatgatttccagtgtctgatacctcgtcacgttctgcggttgataatactatctcaattcatggcccttgaagccatgttgaccacctttctgacctttggatagacagggaataccagatgggctgcgttttcccctcggattttctttccagccttttccctttccactctcttctttgccccgaggcgcagcttggtggactccatcacgaggttccccgacctctgacttatggttggctttggcccatgtggtcactgggaagctctgccaggaatgacttgaggctggggcagttactctctcgtcttcctctctgctggaggctgcagcttctttaagtggcatggcatcactgcccaattgatgctgggctccagtagccactgtctaccttacccttcaggcctgaaggagcgtagggtgggcatctgatacggtttggatgtttgttccctccaaatcttacgttaaaatgtgattcctaatgtcagaggtggtgtctgatgggaagtattgggtcacggggacaggtgggtccctcatgaatggcttagcacactcccccttggtcatgagtgagttcttgctctattagttaatgccagaactggttacttaaaaagagcctggcacttccaccctccctgcccgcccttcttctcttgcctgtggcacgccagttccctatgccttctgccatgactgaaagctttctgaggcttcactagaagcaggtgctggaccgcgtttcttacacagtctgcagaactgtgaaccaaatagacctcccttccatataaattacccagcctcaggtattcctgatgagcaatgcaaaatggactaatacagtctttccacaattgtcggcccccgaatccctcaccacccctgttggtttcttttcaccttgctcctctgtaaatggtctattaaacctcaccatcaacccctttgatggtgccatgtacttacttcctgccgggctttgactgaaacaccaggcttgttccaactggatggctttgcacgtgatggctcccttcttgaacactcttccctcagatctcagcacggtcggctccttctgagggtgtccagcctcagcacacatgtcagcgcctccgaggggcctcgtctgtttaccctctcatcgtccatcctagtactatgcgtcattttctttatatcactttgaccctctgaaatgatcaatacttggttggctgactgggcttgtccagggcatccacaccctcctaagtagatgaggagttggcaaatatattctgttgaggggcagagggtaaatatttttggctttgcaggccatatggtctctgtcacaactactgaagtctgctgttgtagcaagaaagctgccagagacattacataaatgagtggacatgcctgtgttccactaaaacttcattcacagaaacagagcagaaatgtgtggtaggcacattctattcaataaagctatttaagaagccacaaaaaatacacaacaggctggatttgtcctgtgggccatagttgatgaccttgagctagcctgaaggcagtggggtcttgtgtgtcctgttcactttgggtccagtgctttgaacggggcctggctcgtaggaggtgcgtagtaactgttccctgaatgcagacccaggaatgcctgttccatgcaggtcatggtgctgggcagcggcaacaccctggagggccggcaagcacgtgtttatcacacaacatagttgttgctttgtttttcttttttttttgagacagtctcactctgttgccaaagctagagtgcagtggtacgctcttggctcactgcaacctccgcctccagggtttaagtgattctctcacctcagcctcccaagtagctggggctacaggcatgtaccaccatgcccagctaatttttgtatttttagtagagatggggtttcaccatgttggccaggctggtctcgaactcctgacctcaggtgatacgcccaccttggcctcccaaagtcctgggattacaggcgtgagccactgcgtctggccagttgttgcttctgatggtagataggaatgtcctttgcggagcccccagggtgaattgggtcaccctgctgagaaaggcgggactggcctccctgaggagggaacactggagctgcgtctggaaggctgattaggggtttggcaggtgggtgaggtggggtagcagggaggagggctttacgagaagcttgagagggcctggtgtgtttgacggactagactctgctacccagggtgttgagggtgactggagaggagctcaagtggacagaggccagaccagaggcctgcacaccatgcctggtggtgggtcattatcctctaggcgatggagcagcactgaggatgcagcaccgatgaattcacatggttagagaggcgtttccattgagagcagtgtggagagtcatggaggggctggtggcaacaggagactagaaatctcctgtagaagcttccctctatagaagcttcttgccccacatgggtcttggtctagggtggggtcttgggaggatttgtatttgttaaaccgaaccttttgttcagccagggctgaggactgttccctgcctcggcacatcctgcggtctctgttggagagaacggaccataagctgatgcaggctctgtttctggcttgctcgatggtggtactgttccgtggtgcagaggatgagcaggtgtaggtgaggagagggtgtgtccagatttggacattctacaggagtggggtggggagaactgagatgttaacaagtaattgaaaaatgaggtcacaggtagtacagctctcaagaagacagtacaagatgatgatgtgaatctgcaaaggacctatggagtgggaatatcttttggttgggagggtttgctttcttagttggggaaagcattttggaggtgcggtgtgtgtgtaggggcacaaaggagccaagactggaaggatgaggaggaaccagctctcccagtgtctgggggaagacagggaagggcatatgcaaaggccctggggtagggatgagtgtggggtatggaagaaatgtcaagaggggcgcagagcagaatgtgagagggcaatgaggtacgaaataaggcatttgagtggagtttggaaaacagaatttccagttgaccaagatttctggttaatagagtactagttatgctggtttaagaaaacccgtgcgatagtgaatgactgtaataaggatttataagatgtacttgggaatccttgatcctgtaggttcgtgattttgagaagttcaactgctacatttttgcccctggcctagcattacaaccttgagaagattgagtactgtttacaagtatgtacttttttggttgataatatttcttgaaacttctcactttgaaaggggccatacagcatttggaagctgtatgggcagcctgagcatttggcttggatttaatcatgggattttcttactttgggcagcagaattcatataagtgtgtttattcatgcctttttttttttttttttttttgagatgaagttttttggctcttgttgtccaggctggagtgcggtggtatgatcttagctcactgcaacatccgcctcccgggttcaagcagctctcctgcctcagcctcctgagtagctgggattacaggtgcccaccaccatgcccagctaatttttgtatttttagtagagacagggttttaccatgtttgtcaggctggtcttgaactcctgacctcaggtgatctgcccaccttgatctcccaaagtgctggggttacaggtgtgagccaccgcacccggccttattcatgcctttttgactcacttctcctgtggctgttcttgaatttgcatttgccatcatgtgagtgaatcaagagtttgtcgtgttcggccttttgaggaacaggataaggaccacttagcagaacttttggagacatactggcatcttattaagtgggaaatacatggtttcacatggaagtgagtataaatcgagtaggcctgtgtttttgctttggaatctctgttgctcatgtgtttcctgcgtaattgtcctgaagaagagaggagcttgagtgacatgcattctgcaaacatcttgctcccttttgcagtgtgctttctagttattatgtggtgcatatacagcttgtgaagttgttcagcaatttagtggcataaaaagataacctgcttgtcaatttttgtctcaggtcaagtcacttatgcctaagaaaagatgaaaaatgatacatgtaggcaaaatagtcaatcctttagtttgagtctgtatcagctaaacattttttgtaagcctccttttacaggtttgttttttaccattcaaatattaaatataaactttacttatttttattttatattttgagacagagtcttgctctgtcacccagactggagtgcagtgttgcaatcttggcccactgcaacctctgcctcccaggttcaagcagttcttctgcctcagcctcccgagtagctgggattacaggcgcacgccgccaccatgcctggcaaatttttgtgtgttcagtggagacggtgttttgccatgttgtccaggttggtctcgaactcctggcctcaactgatccacctgcctcggcctcccaaagtgttgggattactggcgtgagccaccacacccggccagactttgattcccttctgactgatgagagtcagccagctctgctgcacactagccatgtgaccttggatctaccacctcacctctctaggccgtgtttgaccctgtctaatggggctaccttagggggttgtcgagagttgtttgaagtccttatcctggtgtttaatgcatggaagcatttaatccatgtcatctattcatggtagtagtattaacagtagtagtcattgccgttatcgtaataatagtagcagcagtcttggttaaaaatgtgatttggtggtttgccaaagtggatacattaattcattgatgaaacaaacatttattgagcatctcctgtgtgtcaggcactgagcaaaatacttgggatacagagataagtgggtagggctcttgtggaagagcagccaggcaaatgggagagacaaatgagggggccatgatgggcattcagagcagtgagcgctggaagcaaattaaacagagggtggtttgggagcacagaggaagaaatctatccatgggctgtggtcaggcaaggctgagccttgaaactggagggctagccaggttaacatggtgaaggaagggctctccacttggaggagctggcgagcaggaaggcggggggcataggcagccgagtcttgtagtgtgcaggggagcgtggcgctcagttcacttggagctgattatggtattgggccatttccttaccagagcctttccccacctacttctcaggtggctggaccaagaaggatatgaattgttatgtagacacagctcctggaaaacccaaagatcccgtgtacccaccctcctttagaggccccgtatttatttgtttgatgattgccaccagcagcttcaggcatcagagttgggtgtgtgtggctgttgaaaaccaggaagtcatgatccactttcattcagtgcttccagcagatctcgtgtccaacttaatattgtgaatttaataactgttggtttgtttggactatttatatgcttattttgcaaagcaaaactcaagccctactaggaagaagaaaatgctccgtctttgctttgggttgctgcatggagctctccttacgtggatcagccagtggttaaggaaggtggtaaactggggactttctgttacagtcttccacatggcccatttgctcaatgcatgtcttttttgcttccaaaggaattttgactttgtggggcatgctatgatgaagtcttggctttgctggctgaaccgagtatattgccttcctggccatctcatagctggtgaggtcgttcttcccatttggaaactgttttttctttgtttccctcatgagaagtctggttccagtggcctatgactgcaccagctggttgtctggcccagagctggagtcacctgatggtccttgtctgagctctgccgccgatgcagatgaggttgcagagaggtggctgtgggggccacctgtctggccctccagactgtccaggtgtcagatgtcacagagcctctgtgggtccaggtagagctcttgatatttcttgttccttccctgagctcacctggttgcccttctttttgtcagggttgacttctccacccaccaccaccaccatcatcaatatgatcatcatcatagtagccaccattaattgcccagggttgggaggtgcaatcattgattccattatcgccaccattaagtaatgatgattatgatgactgcagctcacatttattgagtgtttagtgtgtttcagacattcttttaatcctcccaatgaggtaggtagaagtaccactgccctcttagagatgtgggaccaaggcacaaagaagtcatcacttgttgaaggtaacaagccggggagtgaatgagccaggatccagtttcagtgtgattctacatcaggggttggcaaactgtcacctgcagggccaccgtttatttcgtgaataaggtgttattgtaacccatttgtttaggaatggtccttggcagcttgcatgtggcagcagcagaggtgagtagttacaaaggagactgcgtggctcacaggcctgaccctttaccaaaagagctcacctggcaccctgttctggaacccaagctctcagccagcacgctgcgctggctctcaaggaaagacaaaatcaccaggtttccacagtgtcccaggcactgggagacagtcatgaagtggcgtattctggtgaggaggcagacagtaatgatatactcactttagtacaaagagagaattgctctgaaggaaaagtgtaggctgtcaagaaagcagcaaacacaggcagcgagtgcttgcatgtctatgctggagggcggggatccaggcagtttcgctggtggaagtgacatttgagcagatgagggtggagggaggagcctttgggggaaggaaaggatgtgcaaaagcccagaagtgagcaaccatgacctagaggaaagcgtgattcccctttgcatgtgaggaaactggaagcttaaggaacccttgtcacgggtcacatggcaagctgaatggttgctcagagaatcgaaccaactttgtttgaatctaagccccatgttgttgctcctattctaggttcctctgctcctaggtccccacctcgttacatacctcgccccagctagcatcttcccataactgaacaggctgacgggtgccctcgtgaccttggaatgtgccttggccgtagcacaggggcattggcgtggtttctggagccagcctactgtacattcctggtttttccctttgcttcatctctcatcacacagaggcgcttcagccacatttctggttcacctttgctgctagaatcttcttaacaataacgtattgagttattattagatcgttacataaatttctatcaacgcattctggtagatttgccctctagagagctccttcaggagaaaagctcttagaagagtgatgtgagggagtgagttctttgcatgccggtttcttcttgccccagatcatccggagagagggcagaaccttggcacctgggttgtggggtgaggagggtggtggtccccttctgacctgcacgtgctggggagagcttttaccagaaagggttttccgtcacagctgaaggatggctttggaggtgatctcaagacttggcctcactgctgaggggtgtgaggtttcttgtgcaggtgatgcagtgttctacgataacattgtcgggatagctgcacagctctgtgaatatgctgaaaaccactgaatcgtatgcttgaactgggtgaattgtttggtatgtgaattgtatctcacagctgttcttttaagaaggagaagcctgacaaagcttcagggaggctgtccgggagccccagttctagggagggtgccctgtaggctcaaagcgcaagtgacgccgcctggtttgttcatggccccgtgaggctgtgacactgaaacaagccaaaatgtagctctcgtgggtgggagctgatcacgggcttccttttcagaaatgaccccaggaggccatgtgggtcttgtcagtgggcacggacttggctggagggcctgggctggggatggtcctttgccgcctactgccttggtgaagtggctttgtcttcgggcaaggcaacatggacgtactgtgtgaacaggaggggatggcagacatttaaaatgcattcatggccaggcgttgtggctcacgcctgtaatcccagcactctgggaggccaagatgggtggatcacctgaggtcagtagttcgagaccagcctggccaacatggtgaaatgctatctgtactaaaaatacaaaaaattagccgggaatggttgtgtgtgcctgtaatgccagctactttgggaggctgaggcaggagaatcacttgaaccccagaggcggaggttgcagtgagctgagatcatgccactgcactccagcctggggaccatccagggttcaacagccgcctcctgggttcaagtgattatcctgcctcggcctcccaaagtgctgggattacaggggtgagccaccgtacctggccacattcatttattaaatattggtgctgcaggaaatggtaaagaaggtggataagaagctcaagttctagatcgggtttcttgctctccgtgccgacacttgggctggataatcctttgtagtgggggctgtcctgtgcacctctgacttctagatgccaggagtgctcctcccttccccgttatgagaactaaagaagtctccagatgttgcccagtgtcccctggggttgaaattgccccagttgagaagcctggctctagatggtgggggcagatcctgtggcggaggagccatggagaacacatggtgtgagagtggcagcgcatgtgatggtgtgtgggtgacagggagcgggttccttagtgaatctcagtgaacgtgtgtatgtgagctggcgactggggaggccgtgtagcgtttgtggcagttgagagcactggatccagacccatggagcaaagccagctctgggtctcctctgttacgtgggggagaccacttagccctgaggtcatcagtgggggaggcgtgtggatgggtgtgcctgcctgctggtatgcgtgtatcagaacagagaggaaaagctcaggcagaaggaggagggtagatgggctgttcgtggggctgtgggggtggagaagaatgctctgacatgggacggaggcttctgggacttctcacggattggttacagagggagctgtggagggcgacagccaggattctggtttaagtggctgagtgggtggtagacacggtcccagagaaggggttctgtgggagaggaggctgtgtgagtgagtgagtgtgtgtgtgtgagaggagtgtgagtgtgtgtgtgagagtgagagcacgtgtgtgtgtatggggtgtgtgactaaggagtatgagagtgtgagtgtatgaggagtgtctgtgcgcgcgcgcgtgctgtttacagggcctccgagacatcccggaggccctgatggctggagagagagccgtaggatttactgacgacctggagcccaggagaaaaatcccggccagcgtgtttagggtgttaggggcgcagcgtgattttacatatcttagatcacatagcagcttggaggagagcttggagggacctttcactaggcccggtgcttgtttgcggtctataattccttctctagctcctcatggaccctgtgggacagcctcaccctcctgcctggttgacacgggctctttgagagctgagaggttcctactgacctgtattattcctgctgctaattggaggttttagaaagctgcccacactatcttcacgtgatgactaagagcgccaaatggaacccaggtctggggtctgccgttgcatccctaaacctttctgaaaaggcttactttttttttttgaagggagggagggagaaaacacgcacagttagtcccatcttttggatcatcctgagtcagatagcagcaaatgtgtggttttgaagtcataccagagcatgggctttttcagcagaagattctcacgttttgagcctgtgcttcagagggagggctctagggagggcaggaggtctgctgagcacccagctctggctgtagctgtgttccacaggccgtgggtgggtttctgcctttacagtggagaggctggttcagggcttagccctcttctggggtagcgttgccctccctggggaaccttggcaagtgccaagagccacaggcagcccagatttcaggacagggaactgaagagtagatggatttctcctgaccgaaaggatagggaggccttagcttgggcattgtacagtatttgcttgcgttcctgtttcactaatgattgttatatgtactcagcctctaatgtcttgtggtgtggtggtatggcccaattgttagatttggtagaagacctagttttgatcatcagttctgctgctttctggctgtgcactgtcaggcaattccctgacctctctgggccccagtgtccagtgaatcccaagcctcacaggacattgacgaggatgcggtgagaattctgagattgccagcagacatccccgctgctgcttattagtggtggtgttctacgttaccacttatttttctaaattacaccaaaagctttgagtctttattctggaagtgttactctctgttttagcagtgtttttatagacttaacaacatgaagtgttgcctaagaatgaaatgcaaatcggtacctggtggctctcattgtggctttgcttgtcagctgagaagtaggccacgtatgtttctgaaaaggaagatggcaaactcttcttgggaattcaagatgggaagaaaaagaagggaggaggaaaggggcgaggctggagggaaaaggtggagacaggccagagggtggcaaggtgtcagtgcagggctgagatctgtcattttactcttctgctgggtggtacctccaatatctctgagtcccccagggccaggaagagaagaggatgctggatggaggaaaagcttgggtgggatcccacctctaccatctggcagaggggtcatcttggtcaccatccttcacctctccttcacctcaccatcattcacctctctggatctcagtgttctcatctataaaatgggtttataatattctcttcctttcagcaatgttgaaggattaaatgaaatcaggcaaggtgcttagaatactgcctgacagatattaagggctcaaagaattgtcattgtcattaacatgatattatgataaacggacttgacttttataatccctcgagataggaaggacagatgatcatgccattctcgatttaagggacatgggcactgagattcaaagaggtaaagtaatggatgtgaagtggcacacagggcaggggtcagtcagtgttctatgtgaagatgggaaatactttcagctttgtgggccgtatggtcttcgtcgcagctgctcaactctgccattgtagtgtgaaagcagtgttgaagtcaggtgaaatatggagatgaatctacatttaaaacgtttatttgggaagcaagaattggaattcagggtgtacacacagaccaggtggtctctggtaggtccaaagaacaaagagagggttggaggttttctaaacaggaaaaatgttccacattgctctgcaaggaagtcaattggcgccggtaagttctgtggaaccgacaacctctgattggtgagtgactgccggagataaagctggtcttagaattgcagccagtttcagtagctattagataaaagtgggttctggttccaacaggcggttccaacagccaggcttgcagagagttacattcgtggagcaatgttatattccctgagtgcttttccctactggccacttgactctgttttagttgggtgtgacaagaatgacccagtttgtgtgatcagctttcacaagcaggcacagatactgtatgctctaatggcatgcctgtgtttcaataaaactttatttacaaaaaacagatgctggctgggtttggcctgtgggctctagtttttgaccccctgacttcagtgcccaagtgctgagtgaggtcttgaatctgtatcttttggctccaaattctagctctctctcattctgtcatgtagcttcctctacgtcccaatcaggagaagcttatatctgttaaccaggagccaaacaccttctgcttctggagccaatgctaatgtttgggagaagggaaggcttcattttccaacctctgtgatgcctgcagagatgtttccttgcttataacttaatgcgatttgatccccttgacttttggatgggtgctgctgcccctctgcttcttatttatttatttagagacagagtctcactctgttgcccaggctggagtgcagtggtgcgatctcagctcactctgcctcccggcttcaagcaattttcctgcctcagcctcctaagtaactgggattacaagtatgccccaccatgctgggctaatttttgtatttttagtagagatggggtttcaccatactggccaggctggtttcgaaatcttgaccttaagtggtcccccccaaccttggcctcccaaagtgttgggattacagacatgagccactgcccccggccccctgtgcttcttattagtggttctgcagaagcaagtctgaataacccaaggtcattattgggaactgcatgttcctgttaactccccctctagagggcagatagatgcttccctggtgcactactggtattacagagcagtgtctcctgggacatgtagctagagcgtctcccctgtgcttctgagctgtaggaattatgatgtgggaagtttggtgcagtgaaactcatcaagagagcaggtggtgggtacacagttagcctagtgacctctttgactgcagaaactcagggcaagaagacagtggtcccatcttggcaagatacatcgtttgagattttcagccttgacctctgcccaaaggaaagggcgagagaatctagctgttgctgcccatttgagctctgggcagatgggaggtagggagatttatcatgggattttggccaactctgcagcggcattagctcctttgttgacccaagctgggctggaagaggaattaacaatgacagacaaaccaacctcttgtggcgttcaccagttttcaaggcagcatttgagccagcacaaaagaattctcaaagcttgttcaagggaataggtttattttccacgtgataatgctgttggtgctttataaatgatgaacaataaaaagattaggaggttatcaaatgacatggatgtgggatctgtgccatgtggcttgtttgaaagttgctaagctctcccctcctcttagtaataaacagcatgttgaaggaggttttatgtttggcatttttgctctttggatttttagggggaagaaagtggtcctataaatggaaagtattattactattaaaaaaaaaacaaccaattatcttgtccctgaggtaagagggctagtaaacagcttagtgtcctctcctgagaggtctcacaagcaatgctaattatatttcatttactgcttaggtggcttctaaagggagattgacttgggaataattatttggggattattctgtttttagggtttatgttcagggattatctaaatttttactgatctattactaggttgcatttttataaacttcctctattataaatttgtagcaggcaaatttggcccctggccagaagtgggtcactcttggtcatggagtgaattatgtccgcctaccccccgaatatatatgttaagccctaactcccaatgtgattgtatctggagatagggcttttaaggatgtaattgaagtgaaatgaggtcataagtggggggctggccgggcatggtggatcatgcctttgggagaccatggcaggtggatcacttgaggtcaggagttcgagcccagcctggccaaaaagatgaaaccccttctctgctaaaaatacaaaacaaacaaacaaacaaacaaaaaattagccagggatggtggtacacacctgtaatcccagctacttgagaggtagaggcacaagaatctcttgaacctgggaggcagaggtttcagtgagccgagatggtgcccctgcactccggcctgggtggacacagcaagactccgtctcaaaaaaaaaaaaaaagtacggggctgtaatacgataggaccgatacccttataagaagaggggaggttgggtgtggtataatagctcacacccataatcccagcactttgggaggctgaggcaggaggatcacttgaggatctcttggagtttgagactagcttgggacacataggaagaccatgtttctacaaaaataattaaaaaaaaaattagccatggactacccttgtagtcctagctacttggaaggctgaggcagggagattgcttgagcccagaagttggaggttacagtgagctatgattgtgtcattgcggtccagcctgggcaatagagcaagaccttgtctaaaacaacaacaacaacaaaacaaagaagaaaaatgatatcaggggacacactggcagagagaagatcatgtgaggagtggggggaaaaggcagccatctacaaatcaaggagagagacctcagaagaaaccaactctgccaacacctcagtcttagacttccagcctccagaactgtgagaaatacatttctgtggtttcaactgcccagtctctggtattttgttatggcagccctggcagactgatagacattagtgatgtctcttctcccagcttttgacacgtgcaggttcaaatcttggttctgctgcttagcagcttgagtctttagacaagctgataacctttccgtgccccggtttccatttatgtgaaatgggaatagtgaatgttccagaaactatgtctagtcagtcctcagtatctgtgggttttacatccatagattcaaccaactgcagattgaaaatattcaggaagaacatacaaaatatcaatacaataatagaaaacaacacaaataaaaatccaaaatagtataccaattatttatatagcatttgcattatattaggtattataagtaatctagaggtgatttaaagtctaccgggggatgtgtttaggctatttacaaatactgtgccatttcatataagggacttgagcacccttggactgtggtatctgaggtgggtcctggagccaataccccatggataccaaaggatgtgtctgtgtgttgttttagtgtgaattgtgaaagagattggctacatctgagtgttgctatcaaatgttgattctcatttgttctcagtgatttgaatttgacaacctggggatacacattttactagggtttatgactgaggcagtgtggtgtgggggaaaatttgcaggtcctggggtcgggctgttcagggtttttttttgtttctgttttttgttttctgtgatggagtctcaatttgtcatccaggctggagtgtagtggctcaatcatagcttactgtagcttccaactcctgggatcaagcaatcctcctacctcagcctcctgaatagcagagactagaggtacacaccactacacccggctaatcattttactttttgtagagacatggtctccttgtgttttctgggctggtcttgaactccaagagatcctcaagcgatcctcccacctcagcctcccaaagtgctgggattatgggtgtgagccaccatgcctggctgagttcaggtttttctctgttttacttctgtgtcggtgtgtctagctgctttcctactcacagcctcagtttacttagctgtaaagtagtaggaggagagtggaattgggctggatcgttagcattcttgtatgtgatgccagttatatgatttttatggctccattttaattatcgagatgtgactaggtcctcatgaccctcctgtggtctttgtccccacgtgtgtgtgtttatctgtgtaggtcttaatgaaagttacacctatcatcttcacaagcagactgtcatattctctcacagctgcagtgcttgtctcaatgcctggtatataatagatgcttaattattgtgaattttttaatagctgtattaagatgggatttacatctcttacaattcacccacccacctatgcaattcagtggttttttatatattaacagtatacaattatttttttccagtcttttaaaatgagtgaatgaattctgtatctggtgctttgtctgtaacagtgttaacttcaatcagtcaatatttgccaaatgcctgctgtgggcggggtgctggtctcaacactggggagatagcagtccgacaatcagatgaaattccccctgccctcacggagcttaggttcttgttgggagaacactctgtgcctagatatgatagttttttggcatctgttttttgtctagcttttctccagctgttgtgcagagatggttagctggctagtgataacccgtagtctactttgtcttagacctcgttgtcctcactgtttcagacattgctggtaaatgctctatgtcatcttagttttcatatgatcaatagtcactagacatgggggagggagccagggcaggaaatgccaggctggaggttacagatgctgcaggctcaaggggacaagacgcacagggaccctggcaggatgagcatctcgtggttacagggaccggggcatgggctgatgggttcctctgggctcccttgcttatgttccttccatttgctatgatgtgggggtggtggttatgttggaagggcgccggtgctgggagaggcatgtaaactgttagcagccagaagaggtgggaggtttaagtcatgctcattggagtgtgatgctggagacgtattgctttctgttccatggaatgcaaccctcagtcaggacggcacccagctgtccccagatttcgcaaaaccagcctggcttttgtcttctgttgagtcagcccaggacacaaggggccagatgtcctgaatgttccgtcatggtcctggaaaaaacatggaacccccaacagttgggaagctcgcttgataggccttctgactttttgtataggagatcagagatgagtcaaaacaggaccttccagggtatggcccgggccctctctgttatcgtgcatacgcaatgctcttagtggtggtcgcctgtcttcagcatccaaagtatcagacagtgtgtgtagttttccgacttgagtagtattttcttttctttgtacagttgtgcatgtgtgacttggaaggagcatatttgactagatgacacatgggcttctctggagttcctgctctgatcgtaatagtgtattatttttctgaggctgtgtctgtattgtgctagaaagcaaatgagttattatggatcattccaagtgtattatcccatgtatccctgagatgctttgtatgtgaatgctttgtatatgggttaaatataaaatagcataaataaataaccctgtaatactgagtttgaatgggaaatttcagtgtgaaatgatgaggtattttaaaattgtgtttgtgtgtctgtgtgtgtgtatatatatattcctatgtgtagatatctataaggttttagaataacactactacaacaatataattgccaagaacatataaaaatattggcttgtgagggccgggcacagttgctcacacctgtactcttagctttgggaggctgagatgggaggatcacttgagttcaggagttcgagatcagactgggcaacgtggcgaagccccatctctatacaaaatagaaaaagttagccaggtgtgggggtgcacacctgtagtcctagctactcgggaggccgaggcaagaggatcgcctgagcccaggagttggaggctgaatgagccatgatggcgccactgtactccagctttggtgacagagtgagaccctgtctcaaaaacagacaaactggcatatgtttccctgttttcttccattttaagaaaatattcattttaaatctactttacctgagcctatggccagtatatactttactcattccttttgaatcctggtctcatcttgagtttatgtttaatgctttccaccagttctctgttggtatgttgctagtcgtttaggttattgcaagcttcatctgtgacggattctgcaagggactgttgatggttacagtattcccagagttgttacacgttgttactagtttgtgctctttatacttacaaatcagtattgtggatccaaaaatttgtaggtcacattttctgagagtcttaaatatgttactacattttcttgaggcattgctgtcaaagtcttctccttagaagacttgcccaaaggaactcttctttctctaaacgtcagcgattttactagactatatctaggtgttagtcattccgtcagtattttcaggtacatggcatgttctttcagtctctttcaatgtggaacttcgggtctctttattccaacaaagtgtttttgaattgagtttttagtacctgttattttggtttcttctccaggggcttctgttttctgttcatcttatttacctgtcttcagtatttgtcacttcctctcaaatctatccctttcttcatatccttttctttttctaaaaaaaacaaacaaaaaacaaacttgctcttttcatcttctaggtgttccttctaggttggtcttcatttctgaaatactttctttaatgttctgagtttggttacctcgctgcatttttctggttctggcgtacgttgttcttttatgtcatttttgtattgtctccagcttgttttgcagtaggtcaaagtcacttgagaatttctggcgcatctttatctgcagctatattctattacttattctgtttctcctcataatattgtgtatggttttattggatacttctttgttgcttctctgtctctttttttttttgagatggagtcttgctctgtcgcccaggctggagtgcagtggcgcgatctcggctcactgcaagctacgcctcccgggttcacgccattctcctgcctcagcctcccgagtagctgggactacaggcgcccgccaccacgtccggctaattttttaaatatttttagtagagacggggtttcaccgtgtaagccaggatggtctcgatctcttgacctcatgatccaccggcctcggcctcccaaagtgctgggattacaggtgtgagccacctcgcctggcccgttgcttctctttatgtgtagttaggaagtgaaactttaggagagaggcgtggtagagggagcagagctctctctcctgtggatttcgtgtggtgttaggcatactgcagcttgttttctgagctttcctggctcttatcccccatttcatctggatcttctttttccctcttctctaatgtctcgctcctgctaaactgtgattctgcttctgtagctttttccctcactgcagggcccagtcctggaagggagtcctgacagtacagatttgagagtcagtggaggtgggcctgggttaccgtggatctccttgcgctcacctgctaggggagaggaagaatctcctggctttactgcacttctcaacgtggcccaccacgcttttatgaaccccgaatatctgagacaggcctcagttaatttagaaagtttattttgctaaggttgagggcgtgcccatgacacagcctccggaggtcccgaggacatgtgcccaaggtggtcagagcatggttgggttttatacgttctagggagacatgaggcatcaatcaacatatgcaagatgaacattggttcggtctggaaggcgggacaactcgaagcagggcttccaggtcctaggtagattagagacaaatagttgcattcttttgagtttctgattagcctctccaaaggaggcaaccagataggcattcagctcagtgagtagaggggtgactttgaatagaatgggaggcaggtttgccctaagcagttcccagcttgacttttccctttagcttagtgatatgggggccccaagatttcttttcctttcactttccttccaaggagcacctgttggtgatttgcggggagggggctgccggtgatttgggggcctgttggtgattttgggaggtctgttggtgattgaggggggtcctcctcagggcttttcatcagatctgtcgcttgcctctgtgttctacgcagataccatgtaggccttgtggctgtgactttatccttgcctgcttatattttggggtttatgggggtaccttgtcacctagcgttgttgtaaatgctgtctgtgggcttctgcctttttttttttttttctggagacggagtctcactctgtcacgcaggctgaagtgcagtggcacgatctcagctcaatgcaacctgtgcctctggggttcaagcgattctcctgcctcactgttctaagtagctaggactacaggcatgcgccaccacgcctggttaatttttttgtatttttagtagagatggggtttttgccatgttgaccagactggtcttgaactcctgacctcaggtgacctacctgtttcggtctcccaaagtgctgggataacaggcatgagccactgtgcccggcctagttttttttttttttttttttaatggggattttgagagattaaaaaattattctgctgtcactgtcgtctttccagaatctatttctaaacgggcatttaaaataatactaatccccctttgataataatcccactggacaaagcacaaaggaaggaagctgccagcaagggtgaaattaaaggcgaacaggcagctggtaataggccaattgattacggtggattagagctcattttgcttcacaaaagtaattactctgatggctgctaacgcttgctcattcagagcagagcttcccagccactgtgctgcagttggttcttgggagggctgagatagtgattccttcagcactcagggtagtactgaggtggcaggagctccgcacccctgccaaccagttacctctagcctgagtttcatctgtttaccctcaatgggacatagaaatgtcatcctgaggcccgatgcagtggcttacacctcccagcactttgggacgctgaggcgggtggatcacttgaggtcaggagttcgagaccagcctgaccaacatggtgaaaccccatctctactagaaatgcaaaaaaaaattagccaggtgtggtggtgggcacctgtagtcccagctagtcagaaggctgaggcaggagactcccttgaacctgggaggcggaggttgcagtgagctgagattacaccactgcactccagcctggacgacagagcgagactctgtctcaaaaaaaaaaaaaaaaaaaaaaaaggacatcatgagctttgcaatatggatttatttattcatcactcttttttcatggttgggggtagagacagggtctcactttgtcacccaggttggagtgcagtagatcatagctcactgcagctgcagcctcctgggatcaagcaatcctcctgcctcagactcccaagtagctgggagcacgggcgtgcgccaccacactgggctaattttaaatttttgttttagaggtggagtctccctatgttgctcaggctggtcttgaactcctgggctcaagcgatcctcccgccttagcctcccaaagtgctgagattacaggtatgagccatggcacctagacaaatactttgtattttttttaaatttcctttttattttgagaaatttcaaacctgctgaaaagtcctagtactataaacttggatgtacctaccgtccacctagatttaccaacttttttttttgcatatttctcagtgtttttctaaataaatgaataaacacaaacatacagagatacatactgtgtatagatatgtatgtgtgtatgtaaatatacttttcctaagcaatgtgaaagttgtttcagacattgtgattctttttccctgaactcttctgcacttctttccgaagaacaaggatattctcctacattaccccataggaatgtcagaggcatttgaaccagaacaactccatctggaataggggctgggtagaatgaggctgaaactactaggctgcattcccagatggttaaggcattctaagtcactggatgagataggaggtcggcacaagatacaggtcccaaagaccttgctgatagaacagtttgcagtaaagaagccggctgaatcccaccaaaaccacgatgacgatgagagtgacctctagtcatcatcactgctatgtgacagtccactagtgccatgacagtttacaaatgccatggcaacatcaagaagttaccctgtatggtctaaaaggggggtatgcaccctgtgtttagcacgttatcaaaaaataaccatgacaatgggccaccggcatccctcggggctgctctgttgatggagtagccatgcttttattcctttactttcttaataaacttgatttcactttatggactcaccctaatttctttcttgcgtgagatccaagaaccctctcttggggtctggatcagaactccttttctgtaatagtattatgctggagaaaaaggacagtaactccacagtatctaacatacggttcatattcacggttccctgattgttcctaaagtgtcttttatagccatttcttcccaagtcaggatccaaacaaggtttgtatgttagcttcagctggatgtcatcagatggtccttgaggctgagttgcgtgccatgcaccgtgctgaatgttgggctgtagaaactaggcaggcccagagttgttggttttcaggaggtcatggctgaggaacagccttgttacaaacaaaagcaataaaggttcagatctcctagagcctcctgctggtagccttatttccaagagttccgatttaccttgtaaataaatggcatccagttccctcatggtcttcaaactctccatgccttgttagcttcctggaatccacagaatcctttcacgcttgggcactgacctgtaaaaagccatcttaaaaggcttccaggtacattgtcttggctctcttgagttttgaactgggagcctggaggccagagaacagacactccctagaaatgccttctgtagttctcatgtaattcatccccaaggcatgggctggaatggaacatagcagaaacatgttttactcaagcgtagactagcagcagtgacagacagcttgagggagtcttgttttccttttgctgtatcaactcttgcagtcattagctgtcaaggggaaaatcattgtgtttcctcagaaatgtggtttatttggctagatcctttgggactggtttgtgtcaagggcaaggtgtgtgtttgaggggccaacagcagttctgctgtggatgctgaaccatcagctgtcacaagaaaggctgtttgtatgaacctggacttagaatcctgtggccaccttatttttataccatgttcttgctttggttctgagattcccagtccacagctgcctgtagaatttgtaggattcccagagttcgtatgcagtagggggtctcaaactggaattcctacaggggccaggtagataacggaagtgaataaatcagccacatgtgagagactagggagtggggagggatctttgggggaactggagggtacttggctggtctaaaggggcatcaagtccttagtgccagccctggttgctctgagggtgcccaggccccttgtggtcggacacttggctttttcaagagaaacctagatttttaagggaaatgtcctgaattttaattatttgcacagaatttaaaagccaccttctttccctccctcctctctgtcttcctcctactcgccctgcaaacgtgtgtttcagtcagccaggccagtggggtgtggttctcctgttggatacgtggtgatggtccccctccttcaatcacctttctctctccctctgtctctgctgcatggcccacatcgttgtattttgttgttaactttttatccttactgcattcgcagtccatgtttctgcctgtagtctcaagaggccgagatttgttgagacgactgtgacttgtgcaagagtcagattgagttttcagcttggtattcagatgcgggacatctcaccctccagctgttatcagcaacaacaactgcaactgtgcagcagtcgcagtccccagatgctatgcctctgcattgtaggaaagggactcatttgaggtcagatgctcagatgcaagttgcaagataatagcgattgtacctccttgttcccaaatgtcactcaaagtgtttcctaggttctgtcactgcctctgctggaattgtcacagaggagacaggtgaactgcaccccttaaaaccccagtatttatcaaagtaataatagtaggtgggtcttgttattcccagatactgtttattatttaatatgctgtttttatattgaccaaacaaatgttcttggctttatagtaccagttatgagctattcagttaacccttttaacccttaccacgtgggccattactgtaaatctatatatatatttgttgttgggagcttttcagtttctaaaggaacttctttttttaaaaaatctttattttgaagtaatctgagatttgctcaagaattgcagggacaaaaaaagaactcccatgtgctcttcctgcagagcgactagttaatattttgctctattggagacagatttatctgtatctatatctctgtgtatccatacaaacttttttcctgatctatttaagaattagttgcaaacatcatgaccatttgcccctaaatactcaagcagataattttctaagaacaaggatacttccttacacgaccgcagtgtgatgataaaatgcaggaaatgtaacactggtgcagtattatgacgtgatatttaggctatattcatatttcaccaatggggccaatttaacctttcatggctaatctctctgactgagttgggatccagtccaggatcaggcattgcactgaagggtcctgtctctttaatctggggaacacctccacagcttctttgtctttcatgaccttgacttttttttctgggtccctcttctggccagttgcttgatagaacatccctcaatttgggtttgtcagctgtttcctcatgattaggttcaggttatgtgtttttgacaggaactcaaggcttttaatccatctccttttggcctaataaagagacactatagcaagtagacttctggtctcacagatggcaaaactcaatgccaagaggtcaaagtcaagagagatgtagcactcagtggccggggctgactgtggctcacaggtgtgttttgtttggcacttgagatgtttgaaaaatgagtcaatcactggttaaagacctgatgggtcccagaggaatccggacttccacctgctcttgaagagttggaagatctggccacacagggccatattcctgtctgcctggttttgagtcctggacaatgggcacacattctctactttgctgtggcctccaccattcacaagatgcccctgtgcatgtcccctgggcatgcttcattcttctgttacctgcactgcccctctatgcctgggactctgaaagatatgttatagagctgggcgcggtggcccactcctggaatcccagcactttgggaggccaaggcgggtagatcgtgtgaggccaggagtttcagtctggccagcggggcaaaaccctgtctctactaaaagtacaaaattagccgggtgtgcacgcctgtaatcccagctacttgggaggctgaggcaggagatttgcttgaacccaggaggcggaggttgctgtgagccgagatcatgccactgcactccagcctgggtgacagagtgagactctgtttaaaaaaaaaaaaaaaatccaggataggctcccagttgtgttctctccatctgctgctctgtagtcttcttggggcctgtcgggaaacaattttctatttcatagtagtttctcttgcctgttctccccccaaccccctttttttgaaggtgtttatttgggttgccagacttgtgtttatgtacctcttcatgcagtggtactgttgcattcactcctccaaaaggtgagttgtcacattggtacattagggtattccacactggcttccatggaagcccagttgagtccatgagaggctccctcaccttcccattatttagggaaatcctgcatccctcgagggacctgatgcagctgagggaaatcggataatcattttctgaagtggtgaggttgaatccaccatgccctaggagttagctaggggatgagctggggaagaggactcagtcgtttgatgcctgaccttgaaatatgtccaggtgataatttgagcattattccaagtgtttccctagtcctcactccctaggagaaaatagtcctccttgatttggaatatgatgacactggagccctggtttgcaatttatgagtaataatgatgatgacaatgaattactaaccgctaacatttatttaataattaccatatgccagacactttatttatacacacacatacttattttaattctgtctgtagtttctgaaggtagatactttcatcatcccattttataaatgctaaactggggctcagagaggttaagcaacttgcccaaggtcatacagaggtagagcaagcattcccgtcagggctgtctgacctgaaagcaaacactttttaatggcacaaagtgctgaaatgagctgccttcttggtgccagaggagtagcttatgtaagttttgagtgagggactgacaagtatgattccggctgttaagtttggaaccctgtgattttcccattgcacccaggatattttgggtgtgtgtcatctgtaattaattaccttcttgagtgacgagttgtttgggctgtttctctggctctggatatgcaatacaggggccagtgtgccattctgagtgggatttaccaggtggctaatgagatgggctttataaaataaatagtgcaaggatggttacgggggagagagcactaaaaatcaaacaagctttttacagctccattttccaccccctccagctggcagaaatgagatgccacacagcttaatccagagaacagccaaggaggaatgcagacatcctggaatttgagtcccctggcagcagcccttgccctgtcttattagagaaaactggaaggaaaggaaaagttacccagacttcttgtacgtgggaggtaccactgttttctgaacagggttatgagcaataatcgttatgattgtgatatggcaggagggcacatggcagggagtggctcccaggtgccagagtggcccagaagtgtcctggaggcttgccaaaatacagattccaggcttcaccccaagagggtgattacagagagggcctgggaatctgctttttactttttaatttttcacccctgagtctgttaatgtgtttcctacaagcaaaacattctcctttgtaataacaatataacaatcagaattagaaaattaacattgacacatttctgctgtctaatcttcacattatgctcaactttaaccagtagtcccagcaatgtcttttcttgcaaaatggttgagtccggaatgacacatggcatgtgattttcatgtctgttcgggctagaacagttgtctcttttcttgactttcatgaccttgacgtttttgaagatgataggccagtttattgtgcagaatgtccgtgcctttggtttgcttgatgtttccttttgattagattcggtttatgcatcttcgtaggaatgttgcagaggcgatgcatctttttagtgcatcctggcaggtggtgcatggcttcaatttgttccattcctgatgttaactttgatcctctgattaaaatgatgtctgttatgctccttcactgtggagtttcccctttacaattaatacatattttgtagggaggtttttgagctcgaaatatcctattatgcattaaattttccattaattaattttggattgttcagtttctattttattcagcttataatgcattactatcactgttttgatgcccggatcgtctcagagcgtccgagcatcaaaacagtgataataatggattataagctgaatccgtcccatccatcccatttatcagtgggaacttttatgagctggcttctgtgtccttttaaagtgggcctgtaagttcacattgatgtctttaatcccagtccaacatcaccattgacttctcactttcttgacgtatttgttattctcttctccaataacaagatacctggctccagttatcagtaatatattcagttattgatccatccccttgtaagttaactaatctctgatagctttgggctgaattgcttgggaatagaaagtcagggttatggggagatttgctttctggagaagctcctctgctctcttcattatagagatcctccatcctctgaccacatctggaaggaccctggcctagtgctggagggtagaggctttggagttgccctgatgtcagttccacttccactcctgattgaccttggccggtcactgaccacaccgagactccatttccttatggatgagggcaatatttcatggtacagagaaaaataagacatggccactgtcttcaaggatctcatactctagataggggaagatgagcacaggccaggggtattaaagtatgagacttgttaagagagaagcttgtctagaatacgctgggggcagaggagggagctgtcacaagccccatgtggtggaggcagggttggcaggaaggacttcagagagaagagggcctttgaggagacacttgcaaaatgtgtagctgttcaccaggggcctggggcagatgggagagttgcagacagagaatcagatcaaccttagcaaagacacatggggcagaaagagcttggctggtatgggcaacagggaagagctgtgattggccaaatcccagagtggaggtctgaggctgtattaggtggatgtctcagctgctctgggagccctgacagctgcaagaggaggggagggggtcgggtctagcttagagagcatggtgtattgggtagcggggcagcagcctgggtagaacccgggaggagcctttccaagatgacgctgggggaaagtgctctggaaggtatcttttgctttccctcttgccctgatgacctcagtgccagaggcgctggctggctgggtttattccttcagacctcttaggattgattgtttcacaaagatggtgtagagcagcggtccccaacttttttggcaccagggactggttgcgtggaagacaatttttccatggggatgggttggtggaatggttttgggataaaaccgttccatctcagatcctcagacattagatttttatagggaatgtgcaacctagatcttgcatgcccagttcacaatagggttcgtgctcctatgagaatctaaggctgctgctgatctgacaggagagagagttcaggtggtaatgcttgctcaccactcactcaccgctccatcacctcctgctgtgcggcttggttcctgacagccacggtgatggatgacccctggtgtagaggactggtccagttttcactctggagttgcactgtctgcttgtgagtcccagctctgccacttgtcagcttgtcacttgccaggaacgtgacttacctcctctgtaggtatctcagcctgcagccgtctaaaaagctttgcttacacctttccccttctctcctcccccactcagtgctggacaggtggtagctactagcatcattgtcatggtgacaattactcgagggtgtgagggcaaaagtgttctgtaaagggcagtgtaagaatgcatgttgggctcagtgcagcaacaggctaaaggagttctgatgccttagaaaaggtggcggggttggagttagggtcagaagagacttaacaggaatatgtacagttagggaaaaatggtttttcaacattggttgttttattttgcagtgaacttgacctttgaagatttaggatgtggctgcaaacaccacaaagccaggcgatttatgcctcccttcttgccttttattggtgcctattctgggggagtcctcatggtcttggatagccttgccactgggccaccttcttcttgtagttgggtgtggttatggttgatgcctactcagtacctgctggacagtaggcatgaggtcccctcgagctgtgcttttttacatctagggaaagtataattcccataggtgtatcttagtgtggtgttttgatgcctgagaattaccaaatgtacttaccaggttcgttagttttgttgtgagtaattttcctttgagtagtgctgtctggggttgctggttgtttactctgacattggggcaggcctaattgctttgacttacaaacattaattattgcagtcgttggaagctgtttgagaggtacttgccacctactcaatgatttgctttcgttcccatgcttttaaagaaatctgcagggtagccagcaggcctgtttggggctgggagtgggaaggagttggcaaggctttctagaattggacaggcgaatatttgaatacttgtctccatgtgcacggctacctcttcggtcctctcagttctggccaccatcgtttcttgcctggatgaccgtaatggcctcctatcttccggcttcttctgtttccacccctcattccatttgctttttccacatagcaagtctgcattcccttgcttgacacctttttaatttatttttttgtttgtgaattgcagtctcactctgttgcccaggctggagtgcaatggtgcgatcacagctcactgcagcctgcaactcctgtgctcaagtgatcctcctgcctcagcctctggagaagctgggactacaggcacatgtcaccgtgtccagctaatttttaaattaattttatttcatttatttatttatttatttattgagacaaggtctcactttcacccaggctggagttcaatggcacgatctcggctcactgcaacctctgcctcccgggttcaagcagttttcctgcctcagctcccaagtagctgggattacaggtgcctgctaccatgcccagataatttttgtatatttagtagaggcagggtttcaccatgttggccaggctggtcttgaactcctgacctcaggtgatccacctgcctcggcctcccaaagtgctgggattacaggcgtaagccactgtgctcagtctaaaaaatttttttgtagagatgtgatcttgctgtattgcccaggctagtctcaaacttctaggctcaggtgatcctcctgcctcagccttcctaagtgctgcaattacaggaatgtgccactgcgcccaaaacatttatcataatgtttttggagtttcatccaagttgttgcatgtatcaatagtgcattcctttttattgatgagtaagcattccattacttacattccactacaggagtttgtaattccattacaagagtttgagaccagcctgaccaacatggcaaaaccccgtccctactgaaaataaaacaattagccgggcctagtggtgggtgccggtaatcccagctacttgggatctgaggcaggagaatcacttgaagccaggaggtgaaggttgtagtgagccgagatcgcaccactgcactccagcctgggcaacaagagtgaaactccatcttcaaaaaaaaaaaaaaaaagaaaaagtctttcacatagcaaatccagttaaactcttttttctactctggacgatgcttttagtattatatctaagaaatcttctttgtctaactcaggttaggtatgattttctccaacattttcttctaaaccttttatagttttaaattacatttgtttgtggtccagttttacttaatatttgtataaggtgtgagtattggttgaagtttattttttttgcatatgaatgtcttgttgttccaaaatcatgtgtggaaaagattgtcctttctccagaagcgccttcctaccttcgtcacattgcttgattgtgtgtatgggtttattccctgattctttggtctgtcttgttggtgtgtgtctgtcattttgcccatatgacattggcttgagggctgtagctttacaggaagttctaaaattgggcaatgtgagtcttcctgctttgtgctgctttttcaaaaatgattttggctattttagtttctttgtctttccatatgaatgttacaatctgctagtctatatctataagaaatcctgctgggattttgattgggctttcattaaatttatagatcaattttggggaaattgacatcttaattcttttgagtcttctaagccatgaacctggtatctccaggtagttagctcttctttgatttcttttgttagtattttgtagttttcagcatgcagatcctggacacattttgttagatttatatgaatgtatttcatcttttggagctgttataaatgattctttttaaaagtaatttgccttctcattgttcattgttagtgtatagaaatacagttgatgtttacatttgaccctgtgttctgtgaccttgaaaaactcggttattctgtgaccatttttgtcagttcttgggatttcctttgtagatggtcatgtctcttgtgaagagggaaagttttagtccttccttcctaacctgtatgtttttttgggtggggagggccttatttcaccagctagaatctactgtgctgaacaggagtggtgagggaagaattgcttgactcattttcagtctttggaggaaaatattcagcctttaatcattatgtgtgatgttactataggatttgggggtgggtagtttttttttttttttttttaagaaggaatcgcagactctgtcacctaggctggagtgcagtggtgtgatcttggctcagtgcaacctccgcctcccaggttcaagcgattcttgtgtctcagcctcccgaccagctgggattacaggcatgcaccaccaggcccagctcatttttgtatttttagtagagatggggtttcaccatgttggccaagctggtctcgaactcccgacctcagatgatccactcacctcggtctcccaaagtgctgggattacaggcatgagccactgcatctggcctgggggtatttctaacctcttcatacattttaaaaagtgctctagtaaagtgcattgttgaaaaattaaagaaaaatttccaattaattttatcatatagaaatgagcactgttaacgttgtggtctatacatttccagtgcaaatatatccatgtaaatagatataaggggttagagtaaatacactctgtactctgctgcattcagttaatggtatatcagtgtgagtatatatgtgtgtgtgtgtatatacgtaatattcatccctggggataaacatacatatttatcatagctttgacagtcctatagcgtcctattataggaggatgcaccataactttccacccactcttacattatcagacaattaatttgcagccagcttctttcttttatattcaaagcatcctcatgcatacggttttgagacttctctttcttttctaaatacagtttcttagaagtagacttgctgggtcagaaggttacagttcttgaagctgttgattcatatttcctaaagctcacctgtcaccaactgcttacatttatgagatgcctaagggggttggcagcagaagcttgagctccataactcgaggaaagttccttagcctctcttagcaaagctggctggtcaggaggatcctgttcacatctgtgcaggagtcttaaccgcccaagagattctgcagacctgtgctcgttttctcacgcaatttttcaaggccttacgttttcaatgttgccctgttcacttaattcgctaaacgtgtataatgtaataggagactttgaagttaaaggatatgggtttaaatcccaagttggagtgtgtgttagactctctgggcctcaaatttctcatctgtaaaatgggcacagtaaaaccaacctcgtgatgtgttgctggtggtctaatgagacaccaagtgtgtggcagagaggagagggacataggcatggagaggctgaagtgaactgtggctctgcctttgctggttgtgagtttttggatagttcaattagcctcattgagcctcagtttcttttccttttttttttttttttttttttgagacaaggtcttactctgtcacccaggctggatctttgttcactgcaacctccacctccccggctcaaacgatcctcccacctcagcctcccaagtagatgggacaacaggtgcatgccaccacacccagctaatctttgcattttttgtagagatggggtttcaccatgttgcccaggctgttgtcctgggctcaagtaattggcctgtctcagcctccccaggtgggtagcatgagccaccacgcctggtcttcagttttttcatgtgtaaaatgaaggcagtaagaaaaatggcagcaataataacctgttttgtagggttactgtgtagataaaatgtgagcatgtctgccacacctcgaatattaagtgccctactcagaggcaggtgttcatgtgttgcagattgaaaagcatatttcccactacatacgtatggatctctgggaatgaggcacagcttttacctgtaagggggtcttgctactgtgctgcttcccacttcatagctagcaaggagggatttcaaggaaggtgcaaacatctcaaatgtccaactctgccacagtccacattggcaacactttttttacttttcttttttcttttttcttttttttttttttttggagacggagtctcactctgttgcgaggctggagtgcagtggcatgatcttggctcactgcaagctccgcctcccaggttcaagcaattcttctgcctcagcctctttagtagctgggattacaggcacatgccaccatgcccagctaatttttgtattttcagtagagacagggtttcaccatgttggccaggctgatctcaaactcttggcctcacgtgatccacccacctcagcctcccagcgtgctgggattccaggtgtgagccactgcacccagccaggtgtgatttttaggtggaatcttaacacagtattgaaagatttcttcaaaccagaagaaaagcaggtatctgaaacattttagtgctggccacagagttggagatgaacagggaagctgaggatcggcccgacggctggcagcaaatgagaggagacctgagcgccaaacattgacatgacttctgttggtcatgcggcctcttggaaaatgtttttccatgaactgttgtttagaaatgtctataactgcctttctttccctgattttaagatatgtgacttgaattcacatgtgaagattgggagtaggctgggctgggcgatgagtctctggctaaaggaatcctagaaaacatgctctacaggctgggcgtggtggctcacacctgtaatcccagcacttggggaggctgaggtgggcggatcacttaaggtcaggagttcaagaccagcctggccaacatggtgaaacccccatctctactaaaaatacaaaaattagccggtcatggtggtgggcgcctataatcccagatacttgggaggctgaggcaggagaattgcttgaacccaggaggcagaggttgcagtgagccgagatcatgctactgcactccagcctgggcgacagagtgagactgcatctcaaaaacaaaagaaacaaaaaaacacatgctgtacaatccccatcagggaagattttgtctcccacaaacattttaaggacttgttattttgtgtcaaacatttgtgattcatgtcacagatggagaaagtgcagacacctgtggaggcatccatgacaggctttgtctaggacgaggggataactaagggactcccttgtggtttactttctccagagctttggagatgaacgtcgagttctcaggtgatgcctgagtctatggtagtgtctgagtttgatcctttttttttttttctgccacaatacagcacagagaagcaaaatacaaagaaagtgctgttgccgtgggctgagaagtagtcagctgcattgaaaacagacgctcggcaccagggatgagcagtctcaagtttttcaactaagtcagtgtttggcgtatctatagtagtgggtggtatttccatccgtaaatagactgagtgagaggcttactgtggtgcattattaagtgagacgaccagtctcagaaacatttatactatcctgtcatagagactctgagtgttttgggttggtagtgattgtcaaagcatggaggaaggcctgaaaggtatatactaggtttttgccattggttaccatgggaaagtgttgagtggaacagtaaacaagggaaaaaagccttcagacattcacacaaaaattaaaacattgtgaagggtgtatcatccccctaaaattattaggatgtgtgtgtgcacctagagaaataataggatggatataaaaatgttaatagggtttatttcaaggtattggggtcttaccatgttttttgcatttcttcttaaatgtgttctgatggagtattttgcaatgagcattttttatttttataatcacagaaaaaacccagtcttcagctcttctcgttgcaaggaaagaaaaaatattctagcacatttaaaggcacttagactcaagacctgaggtgtagggggtggggcagaaatagaaaacgtgtaagaggcacctccctctggtagagctggtcagaaaccaagtctgaatctcaaagcagatggcgaagagtccttgtgggccttgggggcagggaaacctgggttcagatcttaccagtgagttttactggcgaccttggtcaaacaccgtatttgtccaactcttctcctgtaaaatgtggagaatactgcaggctattgtgcatttttctactgaatgaagcatctttccgctgaatgacggatggatgaatgaatgagtggatgcatgcttggttcaaagagacatatgtaaagtctaaatactcaacaaatggcagtttttccccctttgtcctcatgttctgttgtcacccagtgtacctggggagtgagttcagcaggtggggtcctgtcataccctgggttctgtgttccttagtgtaatcttacatgggggtggatgtggagttggtccaactgcttgtctttatgccacaatctccttatctgtaaaatgagggttgtgttagtgctttggaaggattcaaggagattctatacagacacttgacatgatgcctggcaaataataaatgtttagtacaagtcacagttgataaaagtattaagagcattccccagggtgaatgcacagtagtcagtacatgcttctgcaaatggagagaagactagagttcctgacactgaataggcacctgataggtgggtagctccaaacagcctaagcacagcctgtgtctgtgttctgaatttgtggacactggaaccgattggtgcttatctgtctcatgaaagaatagttcttaaaggcactctgcagacatgcccaaggtaacacaaccatctcccgtgatgatatctaaaccatgagaatatattaacatttataagatgcaaattgtgcttttctttacacaaattcaccacccacccctgccccctcctgtgggtccacattgtcactttttaaatatatatttttttaacattcttgtacctgcagagagaacgaggtgctcaaagtccaactgaagaaatatgtaggagctgtccagatgctgaaaagagaaggtcaaacagctgaaggtgagggggagcctgagcccgggttgggaggggccgggcttttccattaacacctgtacgtggcacgcaatagacactcaatgtgtgacgagtgcatatgtggatggattagaataatggtgctgctcagcgttccagaaaattaatcaggtggaaaacctgatgcgtatccctgcaacatgcataactagtattgtaagactcacttgctagactattagcaacagtcttattggtttgtgtacttagagaattttatgtccagagtcttgagacagttgcatggcagtgaaccttgtggtatgatgaagtcacagcaggccacgggtgcaagcaacagaaaggcaagatggcagagaatcagagcgctggacttaggctgatcaggttccaattccagctctggttaagttttctaatctctttgcacctcagttttttcatctgtacagtgaggttggttgacagcacctacctcatgaggcaatccatgtagacgtcttagcataatgcctaccatagaataaatgctgaataaattttagctattattattattattaatcagaaattccagcagatagaagaacagtcatgaagatcttgccaaatgaggtggggccatctgctgcttctaaaatctcctaaaatatttctcagggcagcctgaagaaaggatatttaactctggctgatgtgtcttgcagccctcagccaaaagaccgtaacaaaatttccttaaagacaagctcatagagtgtggacattttaacaaacagtgggtgttccccacattcacatgtcttttttttttttgagacagagcctcactctaccgcccaggatggagtgcagtggcacaatcttggctcactgcaacttccgcttcctgggttcaagcgattctcctgcctcagcctcccaaatagctgggattacaggtatctgccaccatgcccagctaatttttgtatttttagtagagatgggggatttcaccatgttggccagtcttgtcttgaactcctgactccaggtgatccgtccgcctcggcctcccaaagagctgggattacaggcatgagccaccgctcccagcccacatgtcttcagagtcaaccaaacctgcactgaattcatgctcacccacgaccacctgacccctttgaattattttactatacgtaccaggacatcacaccagtgtcatgagagcattgtgaggattttccaaaacaatgaattcagagtttctagtatggtacctggcatataataaatggtggtggtttttttgtgtgatggagacaggattagaatctggctatggcttatttagtaatagtataaagatgtgaatgtttttgaagcttgtatatttcttttggttactgtttgatcaggatcagcttattggtgatgctatttgataacatgccttgctttattcatatttgggtcagtaactgtggtcattctggagttatcagtgcagaattaatcatctttctctgtggcctcatgcccttttcatacagatattgctattatggccctgaattcatctcattatacagaattatttatatgttggtctcccaagtttttacatctcatctctgtttctccagcaactggctttttagtcattcactacattcattacatacttggaatgaatagtatttgtctagccctttacagcctttccaagcaagctcaaatgtactctgatttgactcagtaaccttgtgatgagtaggtatttttctgttattttaaagtttgttattagaggcttaggagagcttaaggggctggtatatgtgtctgtggtggaaatgaactcacgcatttttctccaaacctctggttctttgcattataaaatgcttttaactttactgtgcagaggaattgcctggggagcccattaaatatacctctttccaggacactgccgctgggagttactccagtggacttaggatgaggctgtagatttgcacgtctagataatgtgactctaatgcaggtgacctgtggacagcaccaccaccttttgtgaaatctacaagttacttacacagaacttggattcagtacaaaaagaccattaaagtcgggttaaaaagaagcaccactgggcttgcttttgatttgaaaacctcagcgctacacaatgcatttctaagtaggaaaattttgaacctaatttgcaggttccatatgcccattctccccaaatgggcctatggaacctacagtgtacagaatggtttttcatagcagctgaaggtccatttccccagaccgatcctgagtgccctgagccacagctggatatgagccatttcaggatgtagttgcggcagctcttacatgaattagagcggttacgtacgtacggcgactccacctagcagcagtctcttacttctgcattattacattcttgtgtaaaaagcctccaggatttaaacaaaacaacttaaaatgaacttttagaataaacattggcaacctttaattttacaggtatcaaatttcagattcccacccttttttttctctctccaagagaatcattatttaagcaccaaaataaggactggaatttgggtggcttcattatctaatggaaagttttttttgttttatttttcttccccgaatgtggtccagaagtgaggttgggttatttgcctctcaagtgctgtttttccttggtgatgtcagatttgccggaagtttacacttttatttgcgcttttgaatctctcacctcagggcaaattcttcatgctcttcctccagcattagaaccttggtgcaagggctgccatatctaccaggaacttgcctggcaattccacttcgttgtaactcttactggtcatttgattaattctgttgttaatggcgttggacaccctttctcctcgccacggagccagtgtagggaagtttcacttatgaaagtaggaaatcacttaaaagaggaggcgatcctcctcctctcctttcacttacgagagcaggagatccctctgaaaactcatgctttcattttgggcttattgctgaaatgtgaaacaagatgtttgcaagttggcttcctgcctgcagagaggccccttggcagctcactgaggggtctggggagagcaggtgcatcacttcaaccttagggttgtgtggacaagactggctcattaggagtgggctcacattagccactgtcaggtggactggtggcgttggaggtgacatttctgaagttgtgtagcatggccccgctgtcaggtggactggtggcattggaggtgacagctctgaagttgcgtagcatggccctgctgtgaggtggactggtggcattggaggtgacagctctcaagttgtgtagtgtggccccattctcaggtggactggtggcattggaggtgacagctctgaagttgtatatcgtggccccactctcaggtggactggtggcgttggaggtgacagctctgaagttgtatagcgtggccccactctcgggtggactggtggtattggaggtgacatttctgaagttgcgtagtgtggccccactctcaggtggactggtggtattggaggtgacagctctgaagttgcgtagtgtggccctgctgtcaggtggactggtggcattggaggtgacaactctgaagttgtatagtgtggccctgatgtcagatggactggtggcattggaggtgacgtctctgaagttgtgtagtgaggccttgctgtcaggtggactggtggcattggaggtgacagctctgaagttgtgtagtgtgaccctggtgtcaggtggactggtggcattggaggtgacagctctgaagttgtgtagtgtggccctgatgtcagatggactggtggcattggaggtgacgtctctgaagttgtgtagtgtggccttgctgtcaggtggactggtggcattggaggtgacgtctctgaagttgtgtagtgtggcctcgctgtcagttggactggtggcattggaggtgacgtctctgaagttgtgtagtgtggccttgctgtcaggtggactggtggtatcattctttgggtgtggtcagtggctgcatgttcagctgggaggctggccactctgatgtttccacaacagggttgttcttgtggaggtctttgctgtaaaacaaccatcctaggcagtgggcttctcttggactcttcccaggagcatttgcctgacgtgagagcttgctctgtgtactgaagaagagattcccctgctaggattggccacacgtgactccagagagacatgggtctgtccgtgtcacatggcttgagtgacttccccatccacatgtgggtagtgaacatctgtgtcctctgtacttgctccagttttcacttgaccagcgtcctccctcactgtcagtcctgtgatgtcggtggcttcatccttggcctggcaccttacctggatggctctggctagatctcagggcgttagtacacaatcaacaagaattcttgctttcctgttaggctgggagactggggccgctgtagtcagcttgtttccacatagagattgggaatgaggccatcgcacagaaagagcagctgagctgaaaggcagagagaaagcgaactctgatcctgtctttagagcccctgaatccagctgtgcctggcgtgacagtcctaccctggactttttggtaataggggcagtcattccgccagcctcccctgctcctgttatcaagcttgattagttttctatagctcatgtgttctatggcaaattattatgtctttcctggatacaggcctgttcgtccttgtaaagggcgattatttctgtggaattgtctttccaagtacagtgtctgctcctgtgctgtaaagcttttcctcctacctcccctcttactggatgctccactgtcataactgttcatggccaccatagcgtagtcctgttcaatagcaatggattttaaagccacgagctctcctcggcatccccatttaattaatctgcagtcagcccagggagagagggagaaggaatagaccattgctggtggccatcaaaataatcagcagcaagggcaggagactgagtgggaggaacttgacagatgagggaggcttgggagcaatttaaaaagtttgttctcagaaacaagcaaaaaattgggaagtcatcagcctgtctggtgtgtcgtgtctttgctgctgtgtgatgtgctcagggattcctggctccacacccacatgtgcttcgtgctctcactggggtgtcagtttccctggggtgagtgcagcgattcccgattccactcctgcgtgtgctttgtgctctggggtgttagttgccctggggtgagcccagtgattcccagctccacacccatgtgcactttgtgctctcactggggtgtcagtttccctgggatgagtccagcaatccccgattccacacctgcgtgtgttttgtgctctggctgggatgtcagtttccccggccttccaaagaatggggcagggcattttcgaaggctgattcagtgaagatggagagtcgtgggctaaatgattcctagagcccacagtgtttcaggggagcttgcagggtaactttttattctttttttctgaaccattgcaggcttctgaaccattgcaggcatccctatgtgcacggcctgctgtttccactcccactgtgcacagaggcaaagatgtcttgtttgaggcagtcttcggttgcaaggaataacaatccaccaaagctggctctgtgtgtgtatgtgtcccaagtggaataaacatggaacctcataaatcccgtcactctgctgtttaccgttcatggttttccagtcctgactttttgatgatggccttcagtgcttgtgatctggctcttccctaagttccaacctcatctcccaccaccctccctcttgctgtctccaccccacccacgctggcctttaggctgatcctcaaacatgccaggctggctcctgcctcaggctctttgcacgtgctgcccctatgcagggacgctcttccctggtctctgtgtggctggttccaccttgccatgcctgtctccattcagataccacctcctcttgactgccctgtcttaccttgtgctgcctccctcattctatctccgacttttcatcacagcacttatcaggccctcaaggtatcttggtcattgattttcttgcttgtttcttcccggtgttccaccttgcactgtacagcccacaagagcagggatgttggcatgtcttttcccctgctgtgttgaaagtgcctgcacagtgcttgatccatgacacgtgctctataaatgtttataacataaatgaatataaataaaataggagctgttggatctcatggccttgagttgattccagatctgttgcagctgtggagagcctagtagtggacaaattcatagacctttcttctagtgccacccaaataatgtgcatcacccccatgtaactgcatctttcagttgtgcctccagctggattctcctgatcgtgtgtggtttttgcttttagtgaccacgattatcatgtgaccttgaccctgccctggttgtgtcattcagagctcttgtgatgacaggagtcatacaatctgatttaatctgtcttaagccaaatacaagagaagtccaggagtatctgccttcagggatggtttgatccaggggctgcaacaatatcatgggaagttttttctttctttcttcagtttctcaactccaatttttttcattgctgggagtgatgtgctggtaaatgtctaacaaatagctttcaaaaaaaaaaaaaaaaaaagccctgatttagaatgtttgcagatttccgtggtgttgtaaatcctccttctatgtctgatttcagactctgccaacacgatgtcactgtttgcagagttggaaagagatgcacgcagttagctcccatgagtcagtacacgggcgctcccatccctcactgtgtgctggccgccttctcagccaggtgttctccttgggctggcaagaggttgccagcagctgtagctttagtctttctagcaggcccagcaggagaggagcttctctcactgtcccgtctttccatctcttcaccccacagagcaatggttcctagtattggcttttaatggagtcacctgggaaattttgaaaaatcccaatgcttggccccacccagacccaaaaatcagtagtgggaatgaggtggttttttttttttttttttttttttaaagcttcccaaatgattccagtgtgcaggttggagtacagcgtttggaaccactgccttggaggatatcactttccaattaatgaagttcagggtcagcaaatatgctacaaatgtgctgacactctctgattcttggccagtagctgacactgtaaattaatcaaggtgcacttttcttcttgaatccagttttagcctcagaatttgtcgcttcatgtaggtaccattgagttaagacctgggaggctaggccaagcgcggttgctcacgcctgtaatcccagcatttcgggaggccaagacgggtggatcaccagaggtcaggagttcaaaaccagccagaccaacatggtgaaaccccatctctactaaaaatacaaaaattagctaggtgtggtggcaggcgcctgtaatcctagttacttgggaggctgaggcaggagaattgcttgaacctgggaggcagaggctgcagtgagccaagatcgcaccacttcactccggcctaggtgaaagagtgaaactttgtcaaaaaataaaataaaataaaaaacaaaaaccagggaggctcaatgggagctgttcaccaccactgtgtgagttaacccagtgcctttactgtgccccaatccctgctcccgcaagaatccgctgtgggtgttaattgtatttcatctccgttcccgacccttcctgttccaccgcagtgtctcgctctcactgctcatcacagagctgctttgctgttacgtttgtctcatgtgcccccatcacaaacactttacgaccccactcttggctcatccagtctcctttcctagaaactccgcttcccttatgcttgctcaggccagatgttgcatttgtggtacgatccagctcttctcctgtcacctgaaagaaatctaattacttggatctttcagtttcctaaacccctgtggtgcttgctacgagcagtaagcagagtctggcatttgctttttgctactatgggttattctgtggtcacgtcttgtgtgtgtgctctgtctactctgctagaccttgtgaccacataaggggtagggtctgggacttagaaacatgcaggttttttcttcttttattaatcaagtacacaacaggtgcttaataaaaatttgttactggggtccatccaagtgactttcaggaatgatttcagagtcacagagatgttgatgtagatggaaagagcattccctgagaagggaaacaagtttggggaagcaacattccataccacttaagagcggggagatgattatcattctcctttctgcccgaagtgaccacaccactctgctcacattccatgggtgagggctagtcatacaggcccacctgggtgcggagggtctcggaagtgttctctctggccgggcagctgctttgcacaagaactctacccactgcaagtggggagcattgagttttggtggctggtcggccagctctgctgtccctgctggggcactcagaggtgtgtggtctccatcttctcactcatttgtgtggctcttcagaaacagcttactttggggtttgtaagctctcagaaggaatgcctgataggttgtgaggatctatggtaggaagggtgtccaagaatgtgctagcaacatgtctctcagatatactgagtcacttggctgggtgtggtggctcacgcctataaccccagcactttgggaggctgagtcaggatgattgcttgagcccaggagttcaagatcagcctgggcaagagccttcagggagccatgactgtgccactgcactgtagtctggatgacggagcaagaggtcgtctctgcaaacagttaaaaaaaaattggccaggtgtgctggtgcgtgcctgtagtcccagctctttgggaggctgaggtgggaggatcacttgagcccagaaggttgagactgcactgagccatgatcatgctactgcactctagcttgggcggtagagtgagaccatgtctctttaaaaaaaaaaaaaaagactgagtcacttgttactcgtttatttctccatttatggagatccttgcactactaggttgcaccttggaaatgtacttagctttgttaggggctggtagaaggtctgttctgcacgggtacattgtggtgtcatttacattggaggcaccagttgcgatagagggaccatgttgtagctgcctctttctgtaaggtgcttttggcttctcctgaaaatctcggtttactaatgggaaaaagagggctttagataaatttagttgtttactgacaaatggggcaagcaggtattccctgtgaaactcacgggttgcaggggggtaaagtataatgtcctaactctgtgacggtttggagcctggagagatgatgggcagattgtggtaggatgatctcagctcattgtaacctctgcctcctgagttcaagcgattctcttaccttagcctcccagatagctgggattacaggcgtgtgccaccatgcctggctcatttttgtatttttagtagagacggggttttgccatgttggccagactggtttcaaactcctggcctcaagtaatctgcccaccttggcctcccaaagtgctgggattacaggcatgagccactgtgcctggctttgaatgttcaagagtttgagtgaccacctgctgtcctctcactctccagctcgagacccctcatttctgtttggaccagatcctggtggggctcaacggctccatggctgggacctgtaggtggctgaagggatgctcctgggccaccagctgcgtgtttgactgctctatagtctcatcaggaccacttaggagacgtgagaccagcagtggccccaactgtctgctgctcagccctcctcggtcaatagcaggagttagaccttgcctacctgctgctctgcacttaagtcaggcattgcttatttgtgtgttgtccttaacaaggtggcatgactttaggacactggccctctgttgttgtcgagcctgaagactcgcttcataagagcctgcccatctgactctgcgtggggctgagaagggtagcaggtgctggcggaaagagtgtgggctctggagacgaattcgtttgggttgaagtcctggttcagtttctgtctgtgtgcacgtggaaccttcaacatcgggtacctattgtctaatcagtatccattccccctttcctggtaatctgttttttctttggggaaccctctgtccagccctcaatccatgtggtttatgtgggcctgtcatcccactacgtcggctactttccaggcacactggttcagggtgtgtgtgtgtcttggtcagggccagccactgctgtcacagtgctgctggggtctcagagcaggaggcacatgcctttacttgctggatttggactggagaggctggggctggggctcctcgttttgcactcaagggactcagacgttccctccacttttttttttttttttaaagacacagggtcttgctgtgttgcccaggctggagcgcagccggacgatcatagttcactgcagcctcaaccttctgggctcaagcaatccctcctgcctcggcctcctgaggagctgggagcactggtgtccaccatcactctcggtgggactgagaagtcttgcctgagaatggagtcgatgcagaggaaggtagagccaagagacagagaaagtgaatccagccaggcctgaagctccctctccctctggactcctccactgccgagcttccaccacctttctggtccccctgggcttgtcttcttttttccagctgcatccttgcttcaggttgtagccaaggtgtcctcacctgctggccattttctctcacatgttccctccctccctcattccctccctacctcctcttctcccctatctcctcccctcctctctcccttctctcttgtttcactctgctccggtctattttgtatttgtttgatgggctgaatctcaagtggcctttaccttttcagatactaagtttgtaaacaggagacctcatcgttgctctccccactgcttgaaataactgccttctgggcactgttttcacctgcaaccctgttttgaggagtaattgagagaattagatgtaaagttcccagcacagcctttagtgcagagtgaggcttcataagctgtttttcccaccacctccctcactttttacacagactccaaaacccctgggtggtttgggaagttaggttatttgatttgtgcagagtacaaggtcagggcaccgtttcattcattcagccaacattgattgaatactccttgagtaccaggcacagttctgggtatacttcaggcccaaggagactcctcaggtttagtgggagagatggacactaaacatataagcaagcaggtaatttcgaatacatattctgatacagcccaaccttttcccacaaggccttgtaaccatctagagaaatccctggctgacagataacagaagctctgttcattgggtacctgtaacgtgctgggccccggggtagctttccctgcagcttttttccttctaacagctctgtgaggatgggactgttgcctccattttacagatgtgagaaaccaaggctctgagaggtggatgtgctgaagctcactgtattagtcagggttctccacaaaagtggaccaataggggtgtgtgtgtgtgtgtctgtgtgtgtagacagattgagatcgatcgatattttaaggaattgacccatgttatggtggcatctgtcaactccagaatctgcagggtgggcctctaggctggagtccagagagaaactgatgttgcaactcaagtccaaaggccgtctgggggcagaattcgtacttccttatgaaacctccgttttttgtttgtttgtttgttttttcttcttaaagccttcagctgattggatgaggcccactctcattatggaagataatgtgctttactgattaaactgttaatctcatttaaaaaatacctttacaatgacatttagactggtgttgggtgaaatatctgggtactgtgacctagccacattgacacatgaagttaatcattacagtcatccacctagaaagtagtagagccgagattcctacccagatctgtctgttaaacccatgctttccccagtgcttctgaagtttattctctcagacgtgttctagggatagtgtatgttgcctctcctgggcctcggtggtggtgtgtgacgagctagcccagagacgcctgcctatgtggggcagcctctgtgtgactggctagcatttaccatgtactttgtcctgagaaaaaatgcgccatgttcgcctttccccccggagactgaaaactgattgtgtgccatgagtcacatggggagccaggttagagtgggagggactcggaagtggacatcagggttggcggaaagcagaaccattgactttccgcttctcaggagcagggctgtgtgtagactggacctgctctttgtccttgaaggctacttcgtccatggtagacagaagccattgcctggaagaggagcctggggaagtgttaatagaactggagcgggaaaggcaggcacagagcttctggttggaggaacctgtccaatcccagccctgtcatttactagctctgagctcacggaataagttgccatctctgagcttcagtatttccatttgaggagtaaagatgatatatattttatatatgtttgtaggccgtttgtatatcttcttttgaaaaatgtctgttcttgtttgcttactttttaatgagattattcatttttttcatgactgatgtgtttgagttccttgtagattctggatattaaccccttatcggatgtgtactttgcaaatactttcttgagtggagaaagaaaacgtggtatgtatacatcatacaatactactcagtcataaagggctgggcgctgtggctcatgccggtaatcccagcactttgggaggccgaggtggttgaatcacctgcggtcaggaatttgagacgagcctggccaatatagtgaaaccccatctctactaaaaatacaaaaattagctgggcatggtggcatgcacctgtaatcccagctactcgggaggctgaggcaggagaatagcttgaatccaggaggtggaggttgcagtgagccgagatcgtgccactgcactccagcctgggtgacagagtgagactctgtctcaaaaaaagaaaaacacaaacaaacaaaaaaaactactcggacataaagaatggaatactgtcttttgcagccacttggatggaactagaggccatcatcctaagtgaagtaactcaggaacagaaaaatagcacatcctctaacttagaagtgggagccaagctgtgggcacacaggggcatatagagaaacataagggacattagaaactctgagcaggaggggaggcgagggatgaaaaactacctattgggtctagagtacatgttgtttgagtgacaggtacactgaaagcccagactttgccgctacacagttcattcaagtcaccaaaagccatttatacccttaaaactgttgaaataaaggaaaaaaataaaattaaaaacaacattgactttatagaattgtttgcagtttaaaagtgatgacacacgcaaagtagcaggcagtggttggtgttgtgggttggaaatgcatttaggagagtgtccaggctgtggaaggtcacagcacattagcagacacctgtaagttagtttctccaagtggataaataattaagatgagaattatagagcaaaccttttcaaaagcttttccatccattaccctgacaaaacagtatttgtgtgattagccagtttcccgacctttaagtaaaccctgaacaggtaagccccagtacccagctatgtggccaccccaaattgcaaggtgggctgggagacgtggggcttatttggcagataaggaaggagcgatgaatactgggtaggcagccaggagtccctgctgcttctggtggccttgtgggaggatgaggctgttggagtcagggatggagggtgctaaagtcccatcaagccacccctttttgccccactccttgggaaaacgtcatcaaatgttgggtcatagctgcaagaggatccagtcccaggttctaaaagtggccctcgtctctctggcgacctccattaaggggtaacgttttatttgttcgacctgatttcctccctggcaggaggctttcttctcccaaatcactgcaaatggaattgcctggaaatatcaagtatcgattcacgattgttgttcatttcatttttattgtttggtaggaaacaaagacccagaaacacaacaggaacaattggagtgcctcagctccctcctcggaaggaggccagacgtatatttattgttgtcgtcattaactttttggggctgtctcagcattgtgtttattggtgtagtttgtcagtcagcttttgttttcaactgctttctgtcctgggagctgacaggtggcttgttttgtaaaaagccactttgattttgaaaactgctctattttaagtttctaattgcagcttttgtaaggaaactggtcattttgttttgctcgagtgggtaatgatgccgtggaccttggttgagagtgacttgcctgaatatttttttttttctcagactgaatggaagaatcgataccctgcacagagagagagcctctctcctggtctgggcttaattcactggtttatggcttcacttgcattctttgcatttccgtagaaatagactccctccttgtcttccctgtggggtgccttctatttactctgcagtctccctgatgcctggcacaccacactgacctccagatacccctgctccaggaagccatccatgatttccctgccatcatttttgctagttggtcactcccaggtctattgctgcctattttatactttaaaaatgtaatctctttatttctgtggtgacagattcaagaaacattagccaggatataaggtcatgagagtagggactgagttgatgttgatactgttgtgcacctagcttccaaaacagtgcctggtccctggtgggttatcagtagacatttgatgaataaatgagtgagtgaatgcatgaatgagtttgctgagcacccagtaataatagccaacatgcattaagcaccattgctagaccctgtgctaactgcttcatggcaactgtcctgtgaggtgggtactattatccccatttacacgggagaactgaagcttagaaaggtcagagaccggctgggcacggcggcttccacctgtaatcccagcactttgagaggctgaggtaggaggagggttgcttaaggccaggagtttgagacgcaatctctacagaaaaaaaaaaaaaaaatcagaaggtgtataatggggccagactctctgggctaaagtcccctccatgcactctatgtaagtattagattgttatcatcaagcgctttgccccaggtgcacagctggggagtggcagggcctggatctctgatgtcctgatacagaagtgagtaatactctatatctacccacctggggctcatagactggggtgactgggtaggcacaggaacctgggctccagaggggggtgcctggtctttttagttcaagatttctgccaggcagtggaacaggcaggcaggtggaccttgagtcctatgatgccctagttgggtgcacttaattagagtcactgggaggcatttgaggtacgtgctgtacccagaattcctcagcttgcacagcttccccttaccctttgtttctgattttgtcctcgtaatctcactgttttggggaatgaattcctccaaaaacaccccgtttcctgcctgtggagccaattaagccaagcaaggctgtacctttaattactgctgccctcatttgcatctggctgccctcattatagtgctattagcagagtgcaggggtcctcctgctggcccatcaggagtggtgcgtgcacagttgtggggccttgctttggtggtctttgctgccttctgggcaaaatgaaggatttggagtagacagcaagcaggcatacatcctgggccagaagcagcctgcggagctcatcgtggcttgccttaaattgtttctcaacaataaagttgttgaaaaacaatttgtgttttctttctccttattaaaaacccaaaattatattcattatagaaaattaaagaagatagacacaagagaaaaaggagaaaataaaatatcattgataaaccctcaagcactgttaatattttggaatatatttttccgagtaggtatggcactttgccacaaacagtcttgggagaagcattctctgcctgaagggctttgtgacccctcccctgaccctttccttgacacatggactttttatgggctcagaagaaatatgatggcacaaaaagcaataaatcattggtagggagtttgggaaaatcagatgaaggtacaatgtgagtgtacataacatcaagcacctgccagcagccagccacacgtgtgtccgagatgacaagaagtcgggtttgatgggcatgcaagctgaccactggtcttgtctgctccttcatgtcttcctaaggaaggtgagacagcattcattatgcagcctgtactgggaagccttatagcatgaagacttagattgtgggtgttggccgagaaagttctagctctgccctttgctagcagtgtgaccttgggcacattgcctgcccatgtgccctccccaccccacccacccctacatctcgttttggatcatttctgttgctgagtcttcaaattcactcgctttctccatttctgttgctaagtcttcaagttcattcatcttctccatttctagtgctgagtcttcaagttcacttgtcttctcttctgcagtttgcccacgacactttcatgaggccacagctagctgcaagggatgctgggaaacatagtctctttgttttccacctaggtggccaagcacccagcaaaaattgctgattttcttgctaaacacaaaaagaatgggtattaggggacacctgctgggtttcttttgtttttgttttgagacagggtgtcccttcattgcccaggctggagtgcagtggtgtgatcatggcttacctcatccttgacttcccaggctcaggtgattctcccatctcagcctctgaagtagctgggactatagcacacctggataatttttttgtattttttgtagagacagggtctcacgatgtttcccaggctggtcttgaactcctgggcttgagcagtcctcctgccttggcctcccaaagttctgggattataggcgtgagccaccatgcccagcccccaacacctgctgtttctgccacacttgtttgttagcagccactgtgcttttgatgagccatctgggaggaggttctggctttgctagagatacggtgatggggtcagttcagtggagacatgtgaaatatggtctctactcaatactttgaaacctacaggtggtagtgtgtctaacacctgtagacaggtagtacaggtagtatatctaccacctgtagtatgtctgccacccgtaggtgaggcagtgactcatccctgtttgggtgaaacagggttgatccttctcttaatgtttcagcagtaagatggccagctgcttttagtcccatgcttatttcccctgtaaatctagggtgttcttggagcatgaatgattggatttaccatgggcatatgtgctgtttatctgctattgatcagtgccaagtgaatttcattcaactggaattcagacccaggtctaaatcttggcttcatgctcatgtcatttggggatggcataactcagcctcatcctccatctataaaacgtggatggtaactgcctggcttactgaacagtagatccaggcttgtgagtgtaagttttaaactactctttctgtataatttggttcctcattgggagacaataaaatttttcttggtttcccatgacttgttatcacttttcccaccttttggggacaatttttagctggagagttccaattatgacagttgacatccaattaaatatgaattatggaaggctctattatttgcaatgataaaaaaattgtttggatatattacagagaattgatttcagtggaagtagacactggagcttgtacttcatactttgattttttaaataatttaatactttattagatttttaaaaatgagtaatatatgccctttataacaagtctagcagtgcagaggtacgtaaagaagttaatctctcccgatgctaccctttttagatcaccagaggtaatcacacaaatctactccacaaacaaacgtatatctattcttcctatttcttttccaaaaatggaattacagtctatgtcaggagttgggaaaccatggcccatgggcatgccacctttttaaataaagttttattggatcatggccatattcattcattatttccatctccgcttttgagctataacacaagagttgaatagttcttgcagagacctgtggcctgcaaaccccaaaatatttaccatctggcccgctgaagaaaatgtgtgctgatccctggtcaaccttgcttttttcaggtaagagtgtatcactgaacagtcaggaattttcctcctgatcaaaagatgtatagctaaatcattaatatctgcatattagagtccatcatgtggctatgctataatttttcaaatcatttcctcatagatggaatttaggttgtttccaggtttttatttattatatattatttatttttttagacacagtctcgctttgttgcccagtctggagtgcagtggcgcgacctcggctcactgcaagctccacctgccgggttcacgccattctcctgcctcagcctcccaagtagctgggactaaaggcacctgccaccagtcctggctaattttttgtatttttagtagagacggggtttcactgtgttagccaggttggtctcgatctcctgaccttgtgatctgcccgccttggcctcccaaagtgctgggattacaggtgtgagccaccgcgcctggccctgtttccaggtttttgctactacaaagaggattgtagtaagctgtctccttatatcctggggccttttggcaggaaggaggttcagaagtgctgttgctgattcaaagcgtgggtgcagcgtccatcatttggtttgcaaaccacatgttatatcgtcagttgtcatctttgatctacatcatcttttttttttttttgatgtaacatcttctataaaagtggttttcagtcctttttgactgtggcccacagtaagaaatactcttttaagcatacacatatgtgtatatagtcattgagacacaaccttctgggaacaatacttaacctttattacgtgcagaacgttctcatgttttatgtcctgttctactctgttttagcaaacgccacttgtgacttactgattattttcgctaccttgctaatgacatacaacctgtagtgtgaaggcagttgttgtgtagaaaggggtaatattctggaatgccgtggtgtacttaagtttgatgttcttgtctgttcgtgaagaccattcttccctttctctcttccttattgaatgtataaacatgttttctcttattgaaaattcatgcgtattttaacacataatgtttttctaattgcaaagtgacgcacagaccagtttcctctggaaatgaggattgtcctgtggtttttgtgtttcactgaaaagagtggatttaggggctttgctaccaccatgcagtgtagacatacctcttggccaagccaccttctaggtgatttgtcctatcttgggtctggctcaatcactcgtacattgatccgggtacccctcactccacagccccccagcgcacacacgtgtacacacacgtgcacgtgcacgcacacacaccccaccggtacctgtcccggcctcaactctctctgtgtccctgactgagtgtcctgctttgttggctttggcccagacaagccttgaaaactgattctgctgttactccagggtctcttgcgacctgcagccttattttagtaagaagaacccccaccctttcgccaccgcgctgtgagttggaggtaacaagaatgtgtgttatttcacagagctgagaagcttggggtgcaggtgtggctggatccaggtgctcaaacagtttaccaggaagatgcatcactttttgtgttggttctgcttccagtgtaggcttatttcattttcagtcaggttttctttatgggagggagggagggaggaagggagggagggagggagggagagcaacagattcacaggcacaaaagccctgggaggttaggggcctgcataggacccagggtggcaggaggaagaggtgagagatgaactggagagacaggcaggggtcaagcaggcagactctgcgtgacctgctatgaggctgtgattttatcctcaggctagggggacctggtgaaaaatggaaagagtgaaatgacctgagccaatttgcatgtttcttccctgctcgtgctgatctcccctgcgtgttgcgttgtttctgtgcacatcagagactggattctgcctttaaagggatggttacttttaggcacctaaaatatttttcttttcttttccttttaatttctgacattgtttgaatttaatgattcatattacgaattattcatgaaaatgatcttttaagcttcttataatagctgaaattatccgtcattagatgctgacagttcctgtgatgggtgtaattataaaaacatattcttaggctggctatattctgcagtgttaaaattacgcaaatgagcaagggataagaatagcagctgagtaggatggtcaggttttatgggagaaggggggtggtagcgctgcacattttctaaaaatgaataaatatgtgctgtacacattaagtacgtctttattacagtctgcctcgatgctcaccctctcttcattggcaggggagcaaattaattttagcgccctgaattgtttgtagttcttgcccatatatgaatcgtatgatgaagttttttttttttcttcttcttcattccactcggcattttctgcgaggcacacgtagtaatctctggtacttctgaagaatggcaaacttggcactgatacgcagcaggctgagtggggaggggagagattggagggtgggggcagaaagccgggggtcactatctagatcactgagcctgggaaatcaggccctcgtcttgttcctgtccaaagggtgaccagatggaccaggtgtggtggctcagccccgtaatcccagcacttcgggaggccgaggtgggtggattacctgaggtcaggagtttgagatcagcctggccatcatggtaaaaccccatctctactaaaaatacaaaattagctgggcatggtggcacacatctgtaattgcagctacttgggaggctgaggcaggagaatcacttgaacccgggaggtggaggttgcagtaagccaagatggcgccactgcacaccagcctgggcaacagagcaagactgtctcaaaaatgaacaaacaaaaaaaggatgaacagatgggctattcatggcttatagtgaccagcaacttgggtttaactttggtggctttgtggggaagtattgggaagggaaggactgaacatccgtcgcatttgctggaaaattgtggcgcccagggccctgcatgcgttggtcctgtctgcctgctctccagcgtgtctgttgaaaatgccccaactgcctcttccccgcatgatcccgtgcttccttgggtgcactaaggaactcccaagagaggggttgtttattccagggcactgtcactgaccgtaccatctcatttcaactcatcagcagtgacgagcaagtgagctctcccttctccctgccttggaactggacctttccacgttaggtagagaggatgataaagaataaaagctaaaatttaagtagtgctaactccatgccgggcactgtttgaagatctgtacattgactcattgaatcgtcacataagcctacataggtaggtgctattacgatcttcattctgcagatgcagaaacacagagagcttaagtcacttgcccaaggtcacagagcaaattaggaaacagaaacaagcctggtaaagttacattgatttctgatgggtgcaggggtgagggtgggttgagggggttgtatagtgggagaaatggttgatctgcccactgaaacattctcaaacaagcgggcttgaaattgatgtcagcccatcctctaagcctctcctttccttgttagctcttccacagtggacatgcattgtttttataagggaaaaagaccacttgataaaagacaaccaccagcttgtatgtttacatcgaatggacattcagttggggcagcttcccgctgggcttctggtgcaggcaggaagaagagtggggctggctacttcatatctgggtgaagcttcacagtttgcagagtgctgtcttttttctttgagacagagtctctctctgtcacccaggctggagtgcaatggtgcaatcttggctccctgcaacttctgtctcctgggttccagcaattcttctgcctcagcctcttgggtagctaggactacaggcacccgccaccatgcccagctaatttttgtatttttagtagagatgaggttttgccatgttggccagtctgttctcaaactcccgacctcaggtgatccgcccacctcagactcccaaagtgctgggattacaggtgtaagccacgacgcccagcctgcagagtgctgttttcatttggatgctttgacagccctttgaggccacaggtgtagatattattctcactttgaaagtggctaaactgaggctcaatgcagggctctgcaactggcaagtggcggagtgggcaactgagtttaggtctttggattctaaatttgggactctggctcttgtctccttttgacactagtgatctgaaatgcgtttcctcagtgtgagttgtcattatgagtagggtttctggagtcagaccatgtaagggtgaaccccaatgctaccactcagcagctgtgtgatgctgggcaagttacataccctccctgggcctcagtttacttatgtgtaaaatcgagattatactagtattaggctgggcatagtggctcacacctgtaatcccagaactttgggaggccgaggctggaggattacctgaggccaggagtttgagaccatcgtggccaacatggcaaaaccctatctctattaaaaatacaaaaattaggcttcgcacggtggctcatgcctgtaatcccagcactttgggaggctgaggagggtggatcacctgaagtcaggagtttgagaccagcctggccaacatggtgaaaccctgtctctaccaaaaatacaaaaattagcagggcgtgggggcatgtgcgcctgtagtcccagctactcgggaggctgaggcaggagaatcgcttgaacccaggagatggaggttgcagtgagccaggatggcgccattgcactccagcctgggtgacaagagaagaaaaaaaattcaggtgagagtcatgtgtacttgactgaattgaaatctgttgactgtgctgctgctttgccctgtgggtgggcccagcgcttctgcatgtgatgaggcattgagacctagaggggaccttttcatctgtcatcatggtggctgccatgtattgagggcttactttttgccaggctgttggcaagcatttcatggccagtggctcgtggaatccacgccacagtactttatgatacgttctgatccttatcctgttggacatacgaagaaacgtagcctcggaggggttcagcagctcattgaagcccatgtggataatggaggcgagagttcaggtggatgcccaggtctcctcactccagagccacggcttctacctcttgccttgcccgtggtagccttcctcccctagccagcatgcagttggtattgcagagctgggtggaactctttttccttttgtttctttctcagcatgtaaaatactactctacttgagtagtaggttattggggcacctggcatcagccttcaggagtcgagtagatgtggtaaattctacatctcccttgctccctgcattcctccctctcctcttccctttttcctttcctctccttcctccctccttctttctctctccctctcaatccttattgctttctccgacaactgtttttagagggcctgccataggccaggccccggtggatgccatgatgcagacctgagacatggtcactccccctggggctcccagcctggagaggagggagtggtgactacaccacaggacgtgtttcttaacacggtgctgaggacatccaggtgcagctggagcaccgtgtggagctcctcacccattctagatcaaggaagggttcttggagaaagtgacatttgatcagagggttgaaggttgagtatgagttcttcaggtcaaaacagggaagtgagatggccaaagctcactgaagaattctaaagagcctacatgtgcaaaagcagggagtattgttgaatttaccggtggatctttgtctaggcaagggtttgtttttttgtttggatagtaagcaggcacaaaaccagatagtccaccaagacaagcctgatggagtcccagctctgtgtccttttgcatgtgtttacagtaatgagcccaggcaaacgtgacagggttctaggagcaggatcagttctcatgaactgtggattcagatctgtggctgtacatagggccagctcagaaccaaacctgagcattctcccatcaaagggtgaagactcttggcttcatagatgctctgctctgttccagcaagggtgggatagttgataaccttgcaaaccagcctgtggatcttgacctcctcttactttagtcagaaatctttctaacatctgttattctaacaaacagtgcctttggtattgattaatattgattaatatcaaaggcattgatattaataacagtatcagtgatattaatatcactgcctttgatattatcttttgatcagaggtaaagacagctgaactcttaatgtatctacctttaagggacatcttttttacttggctctaggtgtatcataaactttgtagtaggcatctggtaacggcttggctgtgtccccatccaaatctcatcttggattgtaactcccacaagtcccacgtgttgtgggaggatcccggtgggaggtaatagaatcatgggagcgggtctttcccatgctcttctcatgatggtgaataagtctcatgagatctgatggctttaaaaacgggactttccctgcacaagctctctctctttgatgtctgccatccacgtaagatatgatttgctcctccttctgccatgattgtgaggcctctccagccatgtggaactataagtccattagacctctctcttttgtaagttgcccagtcttgggtatgtctttatcagcattgtgaaaacggactaatacagcatccaggtcagcccaggtacaagttgtaaggtagaggcagcatggaaagttaaaggcctttctggcatcgcatgaagatttgaggagctgatacagggatttgaccagatctcagcaaagcccaaacaagtcttgttcttcctcatgtgttaaaaaaatgtgttgactttctagcatccagcccacattgacttgggcaccctcaatgtagttaactccacaataatacactagagttactgaagaggctctcctgccttttaactaaccccagtaagacagatgaagcaattgagttctgtgttttacactgggaaactagccagcatccagccctcatcctccggcattctagcaaggggcaaattcatacaaggtactaaacccctcgcatacaaatgacttctctgttgttccactctttcctaataattaatcctagtgatgattaatcttttcgaacttacatcatctgaagaacggtcgtgttcgacattctggagatctgaaaagtgctctatgtgtttaatgttaataggcagccactagaaaggtgcagaataaatcgaattaatattgtctgggagtttgggatgtcgtaaccagcagaggcccaaaaatgaagtggatgctggcagaaggcatgaatcacctccctgcaacaggagaatgttcttatgattttttaatgaccccctgaaaatgaatgtgcactattaaggtaaactgtttaaaaattaaggcttttgtaattctgtgagtttaaaaggaggagagagagggaaagagaatctatagactgtatggttgataggaggcagcttgtggagctgaaggggtctgcatggagccccaggttctctgtttattctagaaagagggtttgggtttccaggggagctgaagggcgtggactgagccttctttttttttttttttttggagacagagtcttgctctgtcacccaggctagagtacactggtgcaatcttggctcactgcaacctctgcctcctgggttcaagcaattctcctgcctcagcctcccgagtagccgggattacaggtgtgtgtcatcatacccagctaattttttgtgtgtatttttagtagagacgggtttcactgtattggctaggctggtctcgaactcccgaccttagattatctgcccaccttggcctcccaaagtgctgggattacaggcatgagccaccacgccccactgagccttcaggttttggtggcatttatgtaacacgtctactggctagctgattccatcttcaggcggcagggtctggctaccatccctaatcgagaccggatttgaatctatctttgaaagggaaatttggacttggccaatgctcagataagttgggattatgggctgggactgtggtgaagtgtaggatgaggctggagactccctgttggggcttttgtacaagccagcattgctgttgtcatgcagtgcatctgggggtctggcggattggggtgctgcttttctggggacatagcagtagctcttcctttctccccattttacttcccttgtcatcccacagagctgaatgttccgatcatgaccgtgtggttaggaacagccctgtttagcgcatttctcaccttttccttttcctcacttcttctcttggactccttcccccaacccaaatgatctgcaccccagtgacaacgtggagtggctccgcggaagatggatgatacacacttgtgatgttgctcatgttttatggttaactgcctggaattcttcagagttcttttcatagcagttgaaggctgaaaggcacacagaaatgaccaactcaattctgtcaacatttgctgagtgttctttttctgtgtcaggccctgggaactggagcttatcttacacaaatctatggggggaaagtaagttctctagattcttgctattcaaaatgaggtctctgaggccgggcgcggtggctcatgcctgtaatcccagcactttggcgggccgagacaggcagatcacctgagatcaggagttcaagaccatcttagccaacatggcgaaacccagtctctactataaatacaaaaagtagccaggcatggtggctcgtgcttgtaatcccagctgctcgggaggctgagacaggagaattgcttaaacccaggtggtggaggttgcagtgagctgagatccagccagtgcactccagcctgggcaacagagcgagactctgtcttaaaaaaaaaaaaaaaaaaaaaaaaaaagaccgaagtgaggtctctggaccagcagtagtggactcgtcacctgggagcatgttagagaggcaggatgttgctgggctggcccacgcctgtaatctcagcacttccagagacttaggtaggaggatcacttcagcccaggagttcaagaccagactgggcaacacagttgagaccctgtcaggaaaagaaaaggagaatgtcagaccttaccgtctcagagtctgcactttaacaaggcccccagccgagctgtagacacattagtgttagaggcactgaaatgttctcggtctctgtagagagatggacagatattgacaccatactgctattctcccttccacacccatggcaggcatcattaatcaaacaggatacttttccccaatgatccctgtctaaacttccagcacgttctcagcacagtgttatagatggccacttccagttggtccgagttggcactcgaggtcaggttcagctgctttaccttgcctccagcacagtccatgacagcagcagcatcctgctctctctgcctctgctctggtcactcttacccctttctttacaacacagagctttcttttaaaactacaaatatgctcaagatattttcctgcttaaaacccttcagtgacttcccgttgcaattaaaatgaaatccagatgccttaccatgacttgcaaaaccctgcctgacttggccctgcccaccttttcaaccctgtctggtgcgcagctccccaacctatgctgttctctgcctgtatcacctcatttcagttcctggaacaagccgtgtttttcccgcctcagggctgggctgaccaaagtcaccgtctcttgagttttcccactgtccacgtgaaaaagctaggggcacagagacttgatttgcctgaggccacatggcgagtcaagagccagagggacttcattgcaaagctggtgatgcggggcaggctgcctccctgcagtgaccacacgagggagcctccaccgagtcttctgactcctgttgctctccctaagtgagtgtctagaatgcgcttttctcccccactcccaaatgccttgcagggcttgcttgccctcattccttcacacagaccttggacttgccacctcctcagagagccattccctggcctgccaggatgtaccttgcccccttcagcattccagctatgttttatggagcacttgtgacaatttgcagtatgtcttatttattcctggtttgaacttgttttcggtttctccactagtctgtaagctccctggtagcaggattcctgtttgtgttattggcctccataactaaagcaccagcatagtacctggcacatagtaggtgttcagtaaatatgatttggatgtgtgcatgaatgaataatggaaatggtcaggccagtcctaggattttaggcctggtctggatctaaatgaacatctaaccaatttccatgtcgtgtatgcggctaagcgaagaaaaagagtggtttcatctccctgatgtcaaatggccagttggacccagcatgagtttttgccaatgtagagatacttttgtgacttatgtccagtggaccacatcagatggccccaaataaaccttcttcctaccatttttcatcttttacaattccctttgaagaatggtggggttttttttttttgactgtcacatgatgtttaaagaaaaatcaaggaagataacttcctgcattcttcaaagatctaccgtcaaagggatttacctaacaattgaagtagggtagagggttgctgttcttggggtagtgccttcagccaagtcaaaagggatgaactgagctgacgctgaggttacctctgcagtccgacctgtactggtcaactgtgcttggacctagatcactcaggtagctcagctctgtctcatactggtctggttggacttacgagataattcagaggaactgctttcattctttctaggacagggttcagcaaactttttctataaaaggctggatagtaaatatttttggctttgttgtccagatgggtctctgtcacaactgctcagctctgctgttgtagcagccgcagacattgtgtagatgagtgggcttggctgtatgccaataaaactttatttacaaaacttgcatcagcccggatttagcctcagggccatagtttgtacacgtctgttctaggagtgtttaaacgaaaacaaagaaaatgtaaaagacagctttcattagttgtcaaagtttgcctgcaaactgccttgaaagcttctgaagctggtccttggactcaggagcttgttcttaaacttgagaaacatcattgtctgacttcccgtttgggcaaagagtcaagccatgatttatcagttgcaataaatagcttgtatttttccaaatagacaatcacgttctcttcattagcaacccatctgctggacctgcagtagtactgaggaaagatgccttggtaaacacagtagcaggattgcaaagtgcaaacgaaccctcttgctttggtgacagcttgtttgtggaaactggaccattctgcaaatgagttcatcgatcttgcctaaatactggaagggcctgttcaacattaggggaaatgccaatgtattttgagacagatcaaacaaagctgcaagtggacaaattttagcatttgttttttaacgaatgagcagatggtaggccttgaatgccccaaatgcttatctttgagttaggttggggggaaaatagggaaaccaaatccaaagtgaatacgttaatactgtgccatcacctagaaactatttgggctgcacgttggagttgcaattgtgactcttaagaataaaaatgtttctcccttgtaataagtcgtatgtatgtatgtatgtatgtatgtatatatgtatgtacttactgagatggagtctctctctgtcacccaggctggagtgcagtgccatgatctcggctcactgcaacttacgcctcttgggttcaagcgattctcctgcctcagcctcccgagtagctgggactatctgtaggcatgtaccaccacacccggctaattttaatatttttttattacagatgggatttcaccatgttggccaggctggtcccgaactcctgacctaaggtgatcctcccacctcggcctcccaaagtgctggaattacagatgttagccaatgtgccctgccggtaataagtcatttaaacattaaactgtctgattaggaaacagaggcacaggttgattaaataggatgtaaaggtccctggattgggttgtaaaacttagtccctttccaccataccgtccagctcactagggaaaatgaggaaaacagaacttcgtttaaagtattttccctctctgtagacactttcttaaaaacataattgaactcctgctgtgcatacaattttgtttgttgctttttaccccacttaatcgtctatcacaaagccttttctatcattatgttgactgcattgctgtaatttgtaacaactgtgtgatattccagctagtggatagaccagagttttagtcaatttccaattgttgggcctttttaaaaaaaaaacaaaaaacaaaaacaaaacttttactatactgtaaaatgctgcagggaatgccttttgtgtacagaatttccccatgtttctagttattttggaggatgtggtctcataggcagaattgttgaatgaagtgctaaggtttttctgacttctgtttcgggtttccatattgctccccaggattgtggccattttaaagtgtcaccagcaaacaggccctcttggccactctcaccagcattcataactgttgccattggaactccagtaggcaaaaacctagctccttatatttgtaattcatgagtcactgtggagatggaatacttacttttttctgtgtttatgaattgaatttctttttggtgaataatcagctcatttccttggcctatgtgtttcaggggtttttcctctgggttatgtgaggacttggtatcaataaagatgctggccctttgttttaatggattcgtaagttctcatgtctgggaattgtcatgaattgtcctgcccttctggttgtgtgccccagtttaggtttttagcagttgttgtgatttaggcacttggacagcccatattttgaggatgaaaccttcaagtctgtttgaggatactttaaagggcttatggccattaagggggaagatgcatttgtaggccatgttagtagatgtggtttaaatgcttgaattggctgggaaggtggctcacacctgtaatctttgaactttgggaggccgaggtgggcaaatcacttgagtccaggagttcatgaccagcctgaccaacgtggtgaaaccccgtctctactaaaaatacaaaaattagctggacatagtggcgtgcgcctgtaatccttcggagactgaggcacaagaatcgcttgaacccaggagggtggaggttgcagtgagccaagatcgtgccactgcactccaggctgggccacatagtgagactcggccagaaacaaacaaataaatgcttgaatcgtggcttttgtttgctttggtaaacaaaggaagagttttcgtttttaatctttcagtgggcttcacggtggagtagtggaaacgttggggaatctggctattcatgagagtgtgattctccccaaagccaacaaggacccttttccttttctttttgagacagagtctcactctgtcacccaggatggctgcagcctagagggtgactgtgggcagaagatgtcccctgagagggctggaaaggagatgacacacagaagtcagcacacattggtccttcaaagtatcctatggagacacctctgtactcactatcagcctcaatgctgagttcacagcccacccagcatgggcttggaggggcatggaggctggttgggggaggtggtccacccggaacttgtcctcccaagccccagcctggcaagttgtagtcttgggagactgaaaccctgaccctcacatgcaagtcaccacagttctggatgagagatggaagagcagcttgatttgctggaaatgccttcctctttgtcttcatcttctttgtcttctttgtctttgtcttcctcctcctcctcctccccctattcttcctcctcctccttcctccctcctccctgcaaaaacatgtagtcagtccaggtacccatcaatggtagactggataaagaaaatgtggtacatatacactatgggatactatacagccttaaaaagaatgaaatcttgccctttgcagcagtatgaatgcagctggaggctgttatcctaagcaaattagtgccccaacagaaaaccagatattgcatgttctgacttataagtgggagctaaacagtgggtactcctggacaggaagatgctaacaatagacactgggggctacaagaaggggaggaagggaggagcaagggttgaaaaactaccagttggatactatgcttactgcctgggtgatgggatcatttttaccccaaaccttggcattatgcaatatacccatgtaacaaaccttcacttgtacccccgaatctgaaatgaaaggtgaaaaaaaccacacaaacaactttattgagatataattcacatgccatacaattcatctatttagtgtatgatttaatgatttttagtatattcatagagttgtgcattcacaacattttagaacattttcactccctcacaaagaagcccattttcctgagcagtcactctccaccccagggcctggcaagcaccattctccttcctgtctctgtggatgtgcctgttctggacacttcatatcagtggaatgatacagtgtatggcggtttgtgataggtttccttcatttagcataaggttttcaaggtttatctacattgtagcatgtatcaggatggcattctcttttatggctaaaacagattttactataaggatatgccatattttgtttaccctttcgttagtcgatggacatttgggtttcactttttggctgtgataaataatgttgcaatgaacattcacgtacaagttgtgtggacgtgtttttcatttctctcgggtataacctaggagtgggattgctgggtcaaagcggctgtaccttcccaccagcagtgaatgaaggttccagttattctaccatgtcctcaccaaacacttgttattgtctgtcttttttttattgtagccatcgagtggatgtgaagtggcaccttcacgtttgcaaatcagtggtttcaatttgcatttccctgatggttgatggtgttgagtatcttttcattctacaaatggcttactggccatttgtagatcttcaaagggtgtcttttcaaatcttctgtccattgcttaatttgtttagttgtcttttttattgttgagttgtatgagttctttgtgtattgtggatactagacccgtatcagagatacgtgatttgcataccttttctaccattctgcaagtttcttttcattttctcgatggtgtccttgaggcatacctgtttttaattctgatgaagttgaattcatctattttttcttttgtcatgtacttttggcatcatatctaagtttgtctttaaagcagtgtttctgttaattttaggcttcaaaatgatttgatgttagagctgagatgctgtcggcttcagcccagaggttttgggggttgttggttggagagttgttcattccctctctggacttagcactgcattgtgtgtttccccacctgaaattacttagggctatgtccgtctgcctactggcatcataggcactcagaagatacccgctgaatggatggatgatgggatgatgacttcctgtttgggtctcagctccctaccttacacgtggctctcattctttgcctttatgtttctctctccttttcacccatccttctcttctctgagtgtgtgtatgtgtacttttctccctcattccttccttcctcctttccctgtctctctctgtctttggctttgtctctttctcttggaatctgtctctgtcctgcccttattctgtccctctgtgtcttttttttcatttttctttaactttttcttctaagctgttgaccttatcagatgaactttgcagtcagttggaaacaggctcacttgctcactctttctttcctttctctctctgtccctggtgttcagtaagtttagagaagaaatgcacaaactattgagttccccttcaccaacgtgccccagagttggcagaagtcagagaccagctggcaccaggcatcccgcagtgctcgtgttttcagcttgctgtgtatgaggctgtcccctgggcctgcggtacttaatttgaaatttggttaggaagcggcagtgatccattttcacatttggaggtacatatttggcatgtcagatgggagcagtacagacagatttttttttgtgcactactgcttgagtttgtcaggagttttattatggaaatcactatttctgcctttccattttcccaagttactttcctatattgatatattttcacctgcctaacattggcatatttttcagggttcttgctttacgattcagtagcaagactcaaaataacacagaggaaagaagtgaaaaaacctctgggtaaaaaaaagacttgcatccacattttttttattgaaaggaaacttcatcagtgttttgaacagaaaacttaaacacaataaaggtggatgaaaacatgggttgtaaattgtgtgtgtgtgtgtgtgtgtgtgtatgtgtatgtgtgtgtgtgcttggagtgtagattctgacataaaaatcacagttcttttggcagtgtatagaaaccttaggaaactgaatggtaacaggtaaagattcagaaatgaatagcaacttagggattactggaaaagtacaattttctgtttctgtaggacttctttctgctagggtaggggacggaataaatgttatttaaaactctctgtttccttcctgtcctctctgtctcatatatgctgctcctggttgcatagatagcccagaactgctttacgtacttatttcccaatactatgggctttgattttatatctgttttcccacatcaatctgacataaatctcatcaaatacccatccactgttgccccaacagttaatacatcatctggttgaaccaaaagatcaaactggagaagggaatgcggtcactgttagtcttctagtgtctattttcaaagccttcatttgaagacccatggggagtctgaggagggcatggggcaggggagaagccaggggtcttgacccttctgttgagggtgacctctttttgtactttcatttctcgctattcttcttcttgtactttataccacagcaatgctgaactacttgggattaagcaaggctattatttactgcaatggttggtgcctagaagcccttttcccactacgtcttctctgttgcatgactttccgcatccctgaagacttagttcgaggtgtcacctactctggaaagactctgtgggtccattgaatgctattcttcctcctgtcatgctgactgctgtcactaccgccatctgtcccactgtgttggaaaaccagccacaggctaccactgattgaagactccctatgtgccaggtaccacagtgaacactttgagatgctggcgttcctctttcgcatctcccttggccctgtgctgacattagtctgagcactcgtcacatgcttcggtgatcaagcatttggtcatccgtcctcccctagtggattctgagttgcttggaggaaatgctttgtaccttcttcctgccttgggaactgtgcttgacacgtggtgaaggtcagcaagtcggtgctgcatgaatggatggagaaagccgggtggggagtaaaggcactgggcagcatgagggctttcctggaacttgaaggttggtgcaggcttggacctccggctggctgggtcattcttatagaatatcttgggaaactgactctcagtctcacagtaacttctcaggaatgtgttggctgtttgcagcagttgtacctgggggcaggcagatgccgtgccccagtctccagagtaggcaggtgggaggtaggacaggagggtgcgaagctctgtccacccccgactcctcacccccaccagcataaaacagaaaaagggagtttctgaagcccagcggtgtttcctctcatgcacagcgagaatcacaaagtgtgtccactgaagggcctttggggaggtggggagctgtgcctctgtctgggagtgggcagtttcccctgctttatgcgcttatctctaagcctcccagattttgcaattaaggacatttcacgtttttcgtgtctctctgaccatcatgttgctgttctgttgtgacagccatgcccctggataggatttagatggggcctggccgggtgcagtggctcacgcctgtaatcccagcactttgggaggctgaggtgggtggatcacctgaggtcaggagtttgagaccagactgggcaacatggtgaaacccccgtctctactaaaaatacaaaaattactgggaagtggtggcaggtgcctgtaatcccagcactttgggaggctgaggtggatggatcacctgaggtcaggagtttgagaccagactgggcaacttggtgaaacccccgtctctactaaaaatacaaaaattagtgggaagtggtggcaggtgcctgtaatcccagctacttgggaggctgaggcaggagaatcacttgaacccgggagatggaggttgcagtgagctgagatcatgccactgcactccagcctgggcaacaagagtgaaaactccttttctaaataaataaataaataaaagatggggcctgaggtggggtcagatttcatgatgcagtggccacagaagcaacgacgctggcaggcttttgtgacatgcatagcagctgaggagaaagtaactgggtgtgggggttgaggttggataagggtgagacctacaagccagagaagggagatgaacctcggtggaggggcagtgggcaggccagtggcctttagaccttttaaaaatcattgtggtaaaacatatgaaacctaagatttacataagatttataactgtaacagttgtaaaaaaaaaatacccagaaccttatttgtgaaagggaggaaattaaggggtaagaaggccttggcctctccattccatggcagccttttggatgggcacttttttttttttttttgagacggagtctcgctctatcacgtaggctggagtgtactctgggaggatcgcttgaccacccaggcatgatctcggctcactgcagcctccgccccccgagttcaagcgattctcccgcatcagcctcccgagtagctgggattacagccacgtgccaccatgccggccaatttttgtatttttgtagagatggggttttaccatgttggccaggctggtctcaaactcctgacctcaagtgatccgcccgccttggcctcccagaatgctgggattacaggcttgagccaccgcgtccggccttgaataggtacttgtgaggaacgtcagtggggaccgcaaaccgctgcattgcaaaccatgccaataatagtgttactggttctttgggtttggaattgtgcttggctgctggtaacagagatatggccctggtggcttaaatgaacaacgtatctttcctagaaggtcacacttaggcagtgcagagctgtcgagtgtctctgccacagtctagtgtcctggtccactttatctttctgctctaccatccttagctgtggctcttatcctcaggttggtctaagatgcctgttgaagctctagccagcatgtctgtgttgtaggtagcaaacaggagaaaacaggaaggccaaaaggactctcccccgctaactgtccttcctttaaggagctttctcaggagtctcatctcacaacttgagtttacatctcactggccagaacttagtcggtggcaccactttgatggaaggggcgtgtgaagtgtagtcttttagcttggcacatggcctttctgaatagggcttctgtgatgaaggaagaaggaggggatggatgccaggcaatctgtcctggttgtagaggtagtgctggaggtagctgatgttcattgcgttcattgtttgttgccaggaagtgcattctgtacctgacatgtattagaggtggtgtgtagtgaccagctggagcccacgtctctagcaccagtgaggatttggctgatgagcagagtttttcagtggtcagaaccctctttgctgggtcgtatgtagcctactggaccgtgaactccttgaggacaggagtatttacttttgtctcccaaagcacctggctcagtaccaaggaaatgtcaccaaatgttggcttatttaaaccaaagctatttctattgaaaactacaattaaaaaatattttttggcagggcatggtggctcactcctgtaatcccagcgctttgggagtccaaagctggagaatcacttgaggcaaggagtgagaccctgtttctccaaaaaaaaaaaaaaaaaaaaaaaaaaaaattagtccggtgtggtgatgtgcacaatgtggtcccagctactcgggaggctgaggcaggaggattgcttgaacccaggagatcagggctaccgtgagctggtgtcatgccactgcactccagcatgagcaatagactgacaccctgtctcaaaaaaaaaatcctgattataaagaaatataagtctattagaattttttaaagtagcaccaggacagaaaaagaaaaatcacttgtaatctcatcacccaaaaatagccactattgaagagatttgaagtacctcttcccagtcttttttatttgtatttagagtgtctgtgtaaaacacatttagatcattctaggtaaatcattttgcattctctcgtttcacttggtatcatatcacgagcagttttgtgtctttaaatattatctctgaatggccttaacggccgcatgatgtctctgttaacttcccacggctaggcactgaagttatttgttgttattactgccatggtgatctttatatccacattttagtgtaggattctgattatttctctagggtcagctcctgtgaagagaattgctgggccctttaagattcttggcaaagactgtcaacatgcttcccagaaaaacatgtattgacgccagctgtgtatgagtatgcctgtcaggcctcaccctccttggtacggggtattgtcattttagttgctaatttgattgcaagttttattttgtatttctactgtgtttcaatttttccaggactattgaccatttgttgttttgtttgctgtcagttttttagtattgagtctataacgatcttgattttttttctgtcggtttttgtttcttttagatgttttttgatgcggctgtgcttcttacttataaaatagcatttctttgtcaattcctttttttttttttttttttttttttttgtgagacggagtctcgctctgtcacccaggctggagtgcagcggcatgatctcagcttactgcaacctctgcctcctcccaggttcaggtgatcctccctcttcagccttccaagtagctgggattacaagtgtgtgtgtgtgccaccatactggactaatatttgtatttctagtggagatggtctttcaccatgttggccaggctggtctccatctgctgacctcaagtgatccacccaccttggcctgtcaaagtgctgggattacaggcgttacccaccgcaccttgccatctttgtcattcttgtggtaaatctttttcttttactttttctgcataattattttgacccatagtggtttttaatttttacctaatcaaatccggtgactttttttgtgtggaatttcttccgtttgtagtatgcgtgattgtgggaacaagtttctgcttgcttttcttgaaaaaattagctatttgtgtttgctcattttctagataagctttaaacctcgattccagtagaaaaataattaaccgggattccaattataattttttaagctgcctaggttgcttttaagaggagtaatgagtattgagtaaaattcttgtctggcattggcctggtagtctcttagaattcattgttgtgaacaaaaaaagaaaactggcttaaaattgaagcaagaagccctgaaaatcactgttttacgttaaaagggggtttattgattgaattaacaaaagttttgtcttgatcagacaatggcatgatcaaggacttggtgttatgtggacctagtctgtctctgtgttggtctgtctgtatttctctccctggtctatctttttttttttggagatggagtctctctctgttgcccaggctggagtgcagtggcatgatcttagctcactgcaacctccacctcctgggttcaagtgatcttcctgcctgtcagtctcctgggtagcggggattacaggcacctgccaccacacctggctaatttttgtatttttagtagagatggggtttcaccatgttggccaggctagtctcaaactcctgacctcaagtgatccgcctgccttggcctcccaaagtgctgggattacaggcatgagccaccaggcccagcctccctggcctatctttgtttccccatctctttctctcaacactagtttcatccatgatgggtccatcatcagactgttttctctctccttatggctagaggatgattgcagcagttccagaactttctagttcatgttcagtgtggaaagggggctcctgcctctgtgccaggaggctgtgctcaggttcctggggttgcgccgactccagcatgctcatctaagaacccatagctggccaaggaggttgcccagctctgagtggccaggcccaagtcacatgccactcctgaagctgggttggagtcaggcctggggtaaagtcagtggaatgtgagagctggggagaattggcttccccagccaaaaatgggtgctctttcccagaagttgggtgtatgggggtttaggtttctgatatacagtaaatgttaataataattgcttgtgagcggtggactacagccttgaacccaacttgtttgacttcttgggaggagaaggaagctaccagtgccctgattttatttatttatttatttatttatagtggcattagattctcataggagaatctaattatatataataatatatatatatatatatattttttttttttaagaagaggagttacattcaatcctcatcttgaatcctgtgagtcttgatgttcatagtccacttgtcttttatctggaaagtggccatctctgtctgtgagtggtcggagaattagtcggctaagtttcctagagaagagcatccctcccaggggttcagctgtgtctgatttggccggctcttttcttcttcttttcttcttctcttcttcttctcttcttcttctcttcttcctctcttcttctcttcttcttttcttcttgtcttctcttctctttttttttttgaggcagggtcttactgtgtcacccaggctggagtacaatgacgcaatcacagctcactgcagcctcaacctaccaggctccagcaatcctcccacctcagccccaccctgagtagctgggactgcaggtgcccaccaccacgccttgctgggtttttttttgtatttttggtagtgacagggttttgccacatagcccaggctggactcaagcagtgcttccacctcagcctcccaaagtgctaggattgcaggtgtgggccaccatacccaaccattccccacccccaaaaccctaccgcatctctcagttcagcaggagcctcatctttggagaggcccctggctgtggaggctcctggggagtggcagttcacatgtccgtctttcacgtgtcctggcctgtgggctggaataatggaactgtgggtggcacacagcagagacactatttgtcttctcgctctttctgtatctttcagtgcaggcctggcatctcttgggcacacaccgattcgtgcatgtagttgacagtgaataagctaaatgtgcatttgatgccactctagggcgtatgccagatactgggttaggcttcatgtgctccaggtgaccaaagtctgaccccctagcctggacaggtttcctgtctggccctcgctgatctctgaacctgtgccacttttgttctgctgccctgccattcctctcttacacacctgatgtctcctgcagttggtaagtatttgatgtctctatgatgaatttattaatagtttaataagaacacattaggctcagggactcagtaccgtgtgagattgttagctaacttttactagatcctgctggttattcttgatctgttaggacagcagcctccaaccttttgggcaacagggacctgtttcatggaagacaattttttcatggaccagtctgataccctattttggcccagacattttggggcatgtaattgggttgaatagttgtatgattgggcttcaggtccatccatttagaagacatcagaggctggattgcaggcctggttctaccctcatgggggcctggtgggctcattcaccctctcagagcaccaggtggcttctctgctcagacagaagcacctcctggtgcacctgcatcagagactcatgcggattaagtagggtaataactgttaaaactttgtatctttgcataagtccattcagcatgtctggaaccattgtcaaatgtcatggagtcctttgtggctctggtagaggttaggttctcaccaataaaattactctactggtggtgggggtggtggtttcaagataaaactgttccacctcagatcatcaggcattagattttcacaaggagtgctcagcctagatcccatgggtgcgcagctcacaatacggttcatgcacctctgagattctaatgccacctctgatctgacaggaggtggagctcaggcggtgatgctcactcacccgccactcaactcctgctgtgtggcctggttcctaacaggccacaaccattacaggtctgtggccttgggggttggagacccctgccttagggtgccaaagtggagtctagaattctgagagtggaagaaaggactgttttttccttgataaaatcatacaagccaggcacgatggttcacatctgtaatcccagcactttgggaagctgagatgggaagatcacttgcagtcaggagtttgagaccagcctggccaacatggagaaacactgtctctaccaaaaatacaaaaattagctgggcatggtggtgcatgcctgtaatcccagctgctctggaggctgtggcaggagaattgcttgaaacctgggaggcagcggttgcagtgagccgagatcatgccattgcactccagcctaggtgacagagactccatctcaaagaaaaaaaaaaaatcatccaaatcacctatgcagaatggagggtttcttgtgtgcttcctggaagcaaaattatcttttcagtactgatcagagccctggtatctaaatgaaggatggtttgccactgtttgagaaacacttcagcatctttaagctggagggagtggtgtggatgcttaagaagaagatccctggttaatgctcaaacacagatgtgcgttgctggcagagtcacatttctcaccatttgttactgctacttaatttgaaatgacagttttgtgttctcaaaagaacagtcatgtttctcctttcagatttgttttggcaatttattagcagatctaattataatatttgtttgatgaagcgtcaggtaggagccacctaagtggtggtagcatcgctttaaaaataagtctgaaagggcatagttttcttacagtgatagaaaacattgattccccgcccccctaacaaaaattactcctaaatggtatatttaaattgaacaatgggaagatttttgttgttggattccttaagtagtggttgagagcatatgctctgaaattggtcgttcttacagcggaatcctggcattgctccctatgagctgtgtgacctcagctgagttatttaacatcccccagtctcagtattttcatctgttaaatggggtaatgagaagctccctcacaagtttgttgaggtgttacgtacatgatccatatatttaacatgcggtgacaggttatgtaaagcgctcagtaactgtgactgctactttcatttttgacaaacatgtcaaagatgacatgtttgaattcatgtcatctgcttgggttttgaattatagtgacaactgcctagatttttttttttgtaatgtaggagatgctgacttcttctagttatatttatggggcagaagtctgttaaacatctttaaaattagagtgattgtagtttatttatttattttttcctttttgaccaaacaaaaacccgtcgttgtgatttagcctcccttgctaccactcctcctcctggtttatagaactagtcacaggccttggtcagtgaattctgaaacaaggatttttcctgcaggagtggcatctgtttccttggctggaaacacacttgtgttggcagctctggggcaggcagctttgtggttgatggtgagggtagggagagatgaagtgcttgagacacagagtttctgctgcaggaactgggttgttaggaaggcactggggctgcaggttacgtgtttggacctatcagtcatttgactgtgggagagtaacttgcttaagccccagaatcatcttctgtgaaatagggatattaacaatgcttaatgagtaggtttttgaacagagtggataagtcaacaaaaggttaacatcctacctggtgtgtgggaagcactccataaacagcagctgctgtgtttctatctctgttattacttcccacataaagcacaggtgatgaccaagagggtgtcaacctatgtcaactttgttatccttccgttggagtctgtaattgaggctgatgtatattaacatggaaataaggtctcaggaagcaagagggtgcagctgacaggcagcgctgcaggcagacagctcataattttctcctcctttctgggtgggtcacagttgggactagtctctggattaaaaacagtgctaatgccctcaatgtctgcatgaaaaaaaaagaaacattggccaggcatggtggctcacgcttgtaatcccagcactttgggaggctggggcaggcagatcacttcaggtcaggagtttgagaccagcctggccaatgtggtgaaaccccatctctcttaaaaatactaaaattagctgggtgtagtggcacactcctgtaatcccagctactcaggaggctgaggcaggagaattgcttggacctgggaggcgaagttgtagtgagccgagatcgtgccactgggtgacagagcgagactccatctccataaaaaagaaataacaacaaaaaaacccagtgttaaccctgatctttcatggttgactccctgagtcaaaggtcaggctttatatgtgaccagcacagaagggccaattggtggtattcttagaacaatgacccgggcccacagcagtcactggcaatagtaacagctgcatagggtctgcttaggtctggatgttggggatggatctggcatggctttttgtggaagacatgttggaactcaggtctgtgggagaggaaggtgtcccctcccctcggcaggtttgtctccttgccttggatatggggaaggccagaggcacaaggggaaacagggtgtcaggaggttgagaagaggcctgtgttgctagaactcagagagtgaggggagcagggccttgtaggtccctggaaaggtttgatctttatcctaagaaagatagaaaacctttgaagagtcctaaactgagggctggtggtatcagccctgcattttaaattgatcaccttccctatacgacggggagagaattcaggaaggcagaggccggtatggggtgaccatttggccgttatagcagtcatcttagcaagggatggaggctggctcttcaggtggagatgatgggaattaaaataagttcaaagggtatgggagataaagtggacaagaccaggagtccatggcttgcatttttcgacaaaactctattatcaggatatattcctcctgtagcctttcttcctttacttaattttcttatggcccgcacagtctatctcctcctgtttttccctcaaaatcattctatgggtaaaaataaataccttccgacttacagcagctcctcttccagatgatgtaaatgagtgagtgactgcagtgagcagtgacttgtcacgagaaaggaactgggcacctgtgattgacatgggcacagagtttcttcctggagagccatcaggtccatgttccatttaccaagtgctcagcagggcctgcatttcgtagtggcatgacccagtggaggatttcaatgtggtttagtttattttcagcctcaaggtttaaaaagtcccacttcccagcggcctccagactagtttttaatttttttaaatgttaaggttgggttccttacatggcattctcaggaagtactgttggagagtcttccaaaagtaaaccagttatgaccacatgtgcttcttagtccaaccctgcagttgtacaagagtgacagtaaatctaacttttatcccagagaaaggaagataatgcgtggtgtgttgtttaccacacactgtgtagaattaccatggaacaagggcagggctgacccctcttcccctccactgcagccctcccacctccccaggcccaccgtaatcagatgctgagattgtcacagcagcttccccgctgccctccctgctttcattctggtgatgcccctctcctgtgaggcttctctgtagccaggtgatcctttgaaaatagaagttggctcatgtcactgttgggccctctgagggaaccctttaaggcttcccttcctacctggaacacaatcatatcctgagcctggccctcatccccacaggatccagccctggcctcttcctcctccctcagacatgcccaatcgttgttcttcatcgtgttgcatcttgggtggtcccttgctcttgcttcccctgtttcctggagttcttcctctccatctttacatggctctcttcctctccccatccagatctctgcttttttttttttttctttttttgagacagtctcactctatcacccaggctggagtacagtggtgcaatctcagctcactgcaacgtctgcctcctgggttcaagtgattctcctgcctcagcctcctgagcgattacaggcgtgcaccaccatgcctggctagtttttgtatttttagtagagtagtagtttttgtatttttagtggcgagggggtctcgccagattggccaggctggtcttgaactcctgatctcaagtgatccgcctccctctgcccccaaagtgctgggattacaggcatgagccaccgcacccagccaggtttctgcttaaatgtcactttatcaggaggtcattttatctagaatggcacttctggcactgctttatttttctgtgcagcttttagcagcacatgatagaaaaatgcattcatcttttggtctgtctgactcccccagtagaatctaagctccttaagagtaaggactgttctattctctgccgagtcttagtgtccagaacagtgagtagtgtggagcatgctgtagtaatgtttgttgcttgcatgagtacctgggaagtgcggtgctgggtccacatgattctgtctctgatagtaaggagatgttttctttaaatacttttgcttaacaaaccattcccaaaatgagtggcttaaaacaactccgattttggttactaacaattgggtgagtcaggggttcagtcagggtgtgatgattgaggcagctgtgatggggacagctcatctctgctccatgatgtctgaggcctcagctcatggcggaaatgattggaagggcctgggccaactcaatgaaggccaaggtgtctgggtccttggctctggctgctggccgagtcctgccattttccttcacattgcatccccacatggctggcttgggcttattcataccacagtggtctcagagttctaagagggaacatcctgaaagacaagcccacgtgcaaggctcatcaagcctctgctaggctcacatttgcgaatactccactgaccagagtaagtcacatggccaggcccagagtcagtccaggacgggactgcacaagcgtgtggatcccaggaggtggggttcattccaggccactggtctaaccactggcattaccataggtagatgaaaggacagattgtagaaccagcctgccgggtctgaatcttcatgtaaccactctctattgataggaccccagggaaattgctgagcttttctgtgtctctgtttttctcatgggcaaaatgaggtggagagtatttcacagggagatcattgagaattaggtgaataatacatgtaaaagttcttagactacttcttggtgcatagggaacactgtatacgctactgggtgaccaaaacccacctgtgtgctgagctgtcccggccccattaactcatgtattcctttacttactctttcacactgttcctgttcttatttaatgttaaacacctgcaggtcccagccctctgctaggttctgtgatacaggagaatcccttcctggagttggcaggtggggagggcagatcgacaggtcaaggagcaatctcaatgaagtgtgggctctcccgggttggggagctccagtgccaggggagcccagagcaggagcccatcaccaggactgtggtggggacaggcagggagagcttcctgcaggaaccaacataaaaccagccttgaagggttagacagacttaggtggccaaagggttccaggcaggtggaggagcatgtgcaaaggcccagagacaagagcgggcacgggagttgaaagccttgtgcatagaaacacacagaaggtagcagagcccctgcccagctctcatggggagccaaaatatatagtggtccttttgcaattttcagtctgtagaaatgagtgtcaggcaaagagatacaagtcagagccccaggagagaagccacaggtgggagccgggcagagggccattcggcctcatgttgcaatggcctgtcaggcagaagagggttttaaggtaggtgttagctgaccagaagcacagctatggatcaaggtgttgggagctttttctgcagggctcatgagcctcttacccacttacctctcacttgctccactgggtactggctcgaagcacaatgcagagcttgatgcagtcctcgggttgtgttttgggagaaggctattatttgtttccattctttaagcactcatttttgtgccagagatgaaaagcaggcagatctgtgcacaggtggttgaagcactgggttgtaactgccccatgtgtgaggtccagagagcagggctgtcctgggtggctcagggctggcttcctgaaggaggtagcatctgagctcagtgcagaaagacaaacgggttttctagaagagcgactgggctggtggcttggtctcttcccagagagctccagtcgcctgaagtccccctgggctggtgcctggatccctgaccccggtactgcagttactcctgcaggccgcgaggtactgggaaggatggcgaaatagacagctgctggctgctcctcagagctccacgatggcccccttcttcaccttcagggccctgccctctgggctgcgggccatgtggccaggctgcgcaggacatcaccaagatcctgctttgttgggagcataggcgcaaggcaaacttcctgggttggggtcttgactgtgccatttgctggcttcctgtccttgagcaaagtgcttgtaaagtctgtgcctcacttggttcatctgtaaagtggacgtgataatagctcctgcctcagaagagcttttctcagctttaaatgagctaatgtgtggcaaggacttagaacagcagaaaaaactgctgaagaaatgtcatcgccattatgttcattaatattattgaccctcagtggaccattattgaggatttttaatgaccttacctttatgatgcacaagccagcaatataagaattcataggctgggtacagtggctcatgcctgtaatcccaacactttggggggccaaggtgggtggatcacctgaggtcaggagttcgagacaatcctggccaacatggtaaaaccccgtctctactacaaatacaaaaattagccgggcatggtggcacgcgcctgtagtcccagctactcgggaggctgaggcaggagaattgcttgaacctgggaggcggaggttgcagtgagctgagatcgtgccattgcactccagcctgggcaacagagtaagactctgtctccaaaacaaaagcaaaaacaaaaaccaaacacaaattcataactaattttatttgttttaattttttttttctttagagacagtgtcttgctctgtcacccaggctggagtgtggtggcacgatcacggctcactgcagcctcgagcttctggactcaggcagtcctcttgactcagcctccccagtagctagaactataggtgtgtgccaccatgtcaagtaattttttaaaaactttgttagagatgaggtcctgctatgttgctcaggctggtgtcgaactcctggcctcaagcagtcctctcaccttggcctcctgaatagtgggattacggatatgagccaccacgcctgggtcccataactaatttccttgcaagaaaatcacagtattctcccaagcccagtttactcccagaaatcatctcttctgctcttaccagctttccccaaatccacaagggtttctgcatacagaattgagtgacaaaggaaacagtccacaagctacatccacaaacttcaaagtgacagatttaaatgaaactcttcctcttcctctatcctcctgtctaaaagcttttgaatcccctggctggaagctggaaagctggagttgccagagaagtctggtctggcctcccacctggcggctacctctcatctcctctgggtcctctgagcccctgccccacttctttagcaactggcttcttgacctttcaggaattcagttttcctgtctctaagatgggggaacacacatgcttccttggactgatggaactcagtaaggcagtgtgccattctaagttcgtaggaagtgcttgctgaaatcatcatcatcacccaataataatcacattatttaggctttgcctccctgaacgtgtgtgcatttcccggttccatcagtgccctttctcgctcctgtctgcaccaggtgacctcctgtcaccacagcattgcctccttctggtcctggcagccccgttgcggtgccgaggtgcctggtgcctgttccgcttccctggctcacacccctaagaggcagccgccattggaggggctctgggcacccagccatggggagcctttggtgggccgccagctgtgtctccaagcagcacggtgcccacagtgagggagcagctggctcttccagctgtctaattgctcatcagacccactttagcaccagcttaacaaattccactccttcatcgcaagccatctttttttgtgacctggactggcagctgggataggagtgggggagggttcttgcgttgggtttgagaaatttccagacccagatagagaagctattggtatttaggtctttgggtcatttttgtgggtctagcggttctagaggcatgttcaagggttcattcacgagctgttccctaaccctcctgcccctcagcagcatgtgccaggcaagtgcttgagatgagaacagcagaggtggcgagacagtcattcgggccattacctgttggtgaccatgcattcgccttgatgtagatctttcattcattcatagcacctttcaatactgtgtttattgagtgcctgtcatgggccaggtcctgtactaggcccttgggctgaaagtgaataaaacagataaaaattcctgctatgtggagttgcattctagttagggggagacagaagataatcaacaaataggataaactaaggatgtatagcgtgtcagaagctgataattgatatggaacaaaagtcaaaatagagaaggttaagggggctcaggagtgtggggagatcatgactttaagtgagtcgggatgaactttgttgagaaggcgttgcctgagcacagagttgccaagggggcactggccatgtgaacacaggcagggggatggtggcggtgtgcctgttgcgtccaaggaacaccaaggaggcagcaaggcagagaggaggcggagaagccacagaggcttcagacagtcacatcccctggggcctggtgaggttggtaggcagggaggctggccgcaggtgggaatgagaagggggccactggaggactgtgagcaaaggaggggtggcctctgagttagggttttggaagtttgctgtgtggagactggagtgtgggagcaggggtggaggcagagaagagctggcaggtggttataggagctcaggcacaaggcggtggtggctgggaccagttggggaagtgagaatggtaagaagtggcctgcccctggccttatgtggatgctggagctggaaggatttccaggaacacgggctgtgaggtgtgagtgagagcagtaccagatgcctccagggcattgtcctgagcagccagaaggatgtggagggaggctgctaaccaggatggggatggctttgtgggggccgagcaggagcttgggtacaggcatgttgagtgtgagctatctgaacatctacggagagacagaaggaacgtgggtatcaagagttcagttagtatgccggggcccacaataccgaatggaacacattgagggtattgaaagccccaaaactggataacgtttctgagagagtgagtgtaggtgggccaggactgagctctgtggccctcccacattaagatgtggaaaaaaggagataccagcaaaagagatggagaaggaggccaggcgcagtggctcacgcctgtaatgcagcactttgggaggccaaggcgggcagatcacttggggtcaggagtttgagaccagcctggccatccccgtctctactgaaaatacgaaaaatgagtcaggcgtggtggtgcgcacctgtaatcccagctactcgggaggctaaggcaggagaatcgcttgaacccgggaggcagaggttgcagtgagctgagattgcgccactgtattccagcctgggtgacagagcaccagagactccatctccaaaaaaaaaaaaggtgaaggactgaccagggaggagacaagactctcctagagtcctagaagccacgtgagagtgtgcttgcaggaggggagagcccagctgtgttgtggctgccgatggggcaaatgaggcaagcgcagttggtcccctgagtcatctggtggcagccattggtggcattgtcaagacctagccagtggactgcaggggtgagagcctgagttgcagagcattgatgagagagtaggagaggggctggagagggcgagtggagacagctctttccaggaggttggctgcagacaggagtaaggaaatgcagcagtaatggcagggacgtgcagcaggaattgtttcttcccatcagctgtattgaagtatcattgacaacaactgtgtatctttatggtgtacaatgtgctgttttgatctgtacgttgtgaaatgattaaatcaagttaataaacatattcatcacttcacatacttttttttggtgttgagaccatttaggatataatctcttcacaattttcaaggaaacaatcctgtatttttttatttttttgagactgagtcttggtgcgacgcccaggctggagcgcaatggcgtgatctcggctcactgccacctctgcttcccgggttcaagtgattctcctgcctcagcctcccgagtagctgggattacaggcacccaccaccatgcctggctaatttttttttagtagagacagggtttcgccatattaaccaggctagtgtgagccactttgttctgctaacagtccagtattcttaactacagccaccatgctgtcccctaacccgccagaactcattcatcctgtccaactgaagctttgtactttttgaccagcatccccccatctctcccctgccccgaccccaacctctggtaatcaccattctgctctctgcttctatgctcataagattccatatgagtgagatcatgtggtattttgtctttgtgtgcctggttgagttcacttagcataatatcctccacgtttatccgtgtcatcacaaatgacaggattttcttcttttttaaggctgagtagctttccattgtgtatatacgtcacgttttgtttattcatctgttgatggacacaggttgattctgtatcttggctattgtgaatagtgctgcaataaacatgagagtgcagataaataactcttcgacatactggtttcatttcctttggataaatatgcagtagtgggattgctggatcatatggcagctctatttttagttttttgaggaccctccatgctgttttccataacggctgtactaatttacgttcctacccacagtgtacaagggttcccttttcccagtcctcaccaacatttatctttcttctattttataacagccatcttaacaggtgtgaggtgctatctcattgtggttttgatttgcatttctccgatgattggtaatgttgagcagctggtcatacacctgttggccgtttggatgtcttccttgagaaatgtctatttgcatcctgtgtccattttttaatcaggttatattttcctgctattgagttgtttgagttccttgtatattttggatattaaccccttatcagacctattttgcaaacagtttcttccatttggtaagttgtctcttcactctgttgatggtttcctgagaatttttgttttttggaggtggagtctcattctgtcatgcagatcttggctcactgcaacctctgcctccctggttcaggcgattctcctgcctcagcttcctgaatagctggaattacaggcgtgtaccatcatgcccggctagtttttgtatttgtagcagagacgaggtttcaccatgtaggccaggctggtcttgaactcctgacctcaagtgatccgcctgcttcggcccccaaagtgttgggattacaggtgtgagccactgcgcccggcctcctgagaattttttttgaagagagacaatcagcattcagcagttgtttatgaagtgcctgctatgtgccaggtaccaggctactatctgacttaaaatggggaacaagacagagttcctgggtacgtgggatttccattttactgggaatcacggtgaaagaggcaggaatggccactgatggctctgcttagttccacatgctcacaaccattggtctactggcctcctccacttggacttatgatagctaaagcagaacatctgcttttcccaccaaaacttcaatttctccaccgtcttccccactgtattagttttcttttggtgtggcaacaaatggctgataacaaattatcttacagatttggaggtcagaagccgtggatttcaatgggctgaatgaggtggtggcaggattgtatttgtttccatagactctaggggagaattcctttccttgctcattccgttgttgacagaatccagttccgagtagctgaatgactaaggttcccgcttctggttggctctcagctgggggctgccctgagctctggaggcccccagaacccagaacaagcaatggcatgttgagtccttttcattcttggaatccgacttcctgttctcctgcttctcctctgtggttgtcttctgccatccctctcttctgctttcgactggagggcattctctgcttttaagggctcacgtcattagattgggctcacacaggtaatccagtatactctcctatctcaaggtctataactctaattatatctgcaaagtctcttgctatgtgcagcaacatattcacagcatctttggggcatgggcatctttgggggccattctgcctaccactagcatctctctctctctctctctctctttaagagagacagggtcttgctctgccatccagcctggagtgcaatggcacatctatagctcactgaagcctttaactcttgggatcaagcgatcctcctgcctcagcctcctgagtagttgggaagttggaactacaggcacgcaccaccatgcccggcttatttaaaatttttttttttttttttgtagcatcagggtttctctgcattgcctaggctggtctcgaactcctgatctcaagtagtcctcccacctcagcctcccaaagtgctaggattacagatgtgagccaccgcacccagcacccactcataaatgccacctcttggttgctcaaaccagaaatctgggagtcatcctgtgtttttccgcagactttgtctctgatttacaatctatagccagtcctgccagttccaaaatataccctggagatgaatggccatttgtgactgtcctcactgctatcgcctgggtcaggcccccagagtctctttgcctgggatgctattgtagctctgagctggtcacctgctttccatcctggctcctgtgcagtctgctcttcacacagcagccagagtggtttagcaatcagcaaacaggtcacagctcccagctcccctgatgaaaggcctccaacagctttgcctcatcctgagaataagatatgaagtttcccctgcagcctccagccccgtgtcatctgccgccacctgccgtcctgctctgacctgtcacctcgtctctgtgtgtaccttctttcagtcacagtggcctttctgttcccggaagaagtcccgcgttcccatgtcatcgcacttgccattccctttgccagaacattccccccgtgatagccccatgatggagcttcgagtcagtcagttctctgtgtggttgaggtctccccacagaggcccagcctccatgtctgcaggagctctcctgaggcaccctctccagtgtatgttttgcatagaaattgttactcccggaaattctccttacttatctgctcatttgctgcaagccagatgtaagtgctcagcagaactgtctctcatgttccactccccacaggtcccagggccctgacccatggcagtcgctcacaatgtatatactggggcagcaaatgcagtggtggcatcagaattccagagccttcttggagagtgaatggtacttcgctgcctttccatcttagtagctcagaggaaacgtggaacttgtaagggtttgtgaggtagttcctgaatcagacgtctcctctgttaaaggtgcccagtgtggagagcgttgttattttttatctaatatataatgagacaccaaggaggacttccagcctcccttgggaaatttccctgagtctctgtcggaggaggacttgtgtcttgtgtcattctctctcactatgatagcctggtacaaagagatcctccgtagacaagagttgttccatcagcagacagagagctggattcagccctctggcaggagtgccacgcctccctccccagattccccctcctctctctcctgccctctgcttccccagagcttccttgctttggcttcctagacataattaagattttccaggaagttgtctaggctgtacatcatctccgtgggcttttgaaatagcctctggtttgtcatttattatatcgttccgatttgtcaaggtctccttctcaacgtggggaaaaaaaatgcactccgcttccaggtgtacatgggaatcgtttaaaatacagcgtgattacagctgggccacctggctgctcgttctaccccatctttgagaggaggcagcattggctgtgctggcttggtgtagccactggctaagaaggtgtcctcctcctctctgcccctgcctccagcctgagcaagccctagttctgctgggtgagggggatgctgggatgtttctctgcctcctccagcccgcagcccccacctggctccccgcagcttttatgagagctgtggcgcagaggactgaggagcggattgaagccagcccagggtcacgtgtggctttatggatgagagcccttgaatatgattgtcttcctattttctagtttttcttacctttgggacattttctcatcacctaatgctagtcttcaaactgtaaggtacatcaaaatcaccctggatagttattaaaatgcagattcctggccctcgtctccgatccacggaattcgtttctgggaaccgagacccacgaatctgcattgtaacaagtttccccttccctcccagccctccccatgtgactttgatgagcgtggttcagggtccccctttgagccctgctgatataatggacctctctgctcagatcaccgccacatccaaagtgccctgccaccccctaatcccccgctgcctctgcctctgccccatgaatgcagccgctcaggtctttgctcctgctgatgcgcggccacgttcctccagtcttctcttctgttcctgcaggagacagctgccacattgaggcttcacaggcacttctctgtgaccccttttttctctccattgtgacctgaccctatggcattcttcagaattcataagggaagtgagctttcaacgtgatttcttttttaaacctatcttttttatccccttgaaacatgagactttgccttgaccttgggtttcagggatgatgagtcctcttctgctggtgctacaggcgtccttgttccagccttgacattgttttccttgtaggttcctggagcagggatacattctggatttccaacatgaattgtgtgagatttttgttgttcttttaacctccctgttaccgtcttccttctcatccttcatctgttgtgcgcctggtgctccttgaggactttgtattcttggctttgggcttccttcccatgcggcttgaggcgctggcccatgttatctgttgttgtctagaagtctctccacaaagcccagccccttgcagatgatttgtctttgccttctgagcttctcttttctctcatgtggggtgggggcatccatgtcctcctggtctcttggagtgcgttccaccttctccgtctgcttgctctccagggctttcttagccaggtccccggctggagtggatgtttgctatgagcttgggtctgtgcacggatgtgttgagctggtcgtcaccgccccgctggagtgagtgagtgttgagctcaggtcagttcacacgcccccagctggagtgagtgttcgctgagctccagtctgtgcatgcgcccccggctggagggagtgtttgctgagctcagatctgtgtgcgtgtgcccggctggagtgaatgtttgctctgagcttgggtctgtgcatgcgtccccagctggagtgagtgtttgttgagctcaggtcagtgcacgcgcccccggctggagtgagtatttgctgagctcgggtctgtgtgcgcgcccccggctggagtgagtgtttgttgagctcgggtctgtgcacgtgtccccggctggagtgagtgtgtgctgagctggggtctgcgcatgagtccctggctggagtgagtgtttgctgaggtgggatctgtgcatgagtccccggctggagtgagtggttcctgagctccagtctgtgcacgtgtccccggctggagtgagtgtttgctgagctccggtctgtgcgtgcgtccctggctggagtgagtgtttgctgagctcgggtctgtgtgcgcacccccgggtgaagtgagtgtttgctgagctcgggtctgtgcgcgcgtccccggctggagtaagtgtttgctctgagctccggtctgtgcgtgcgtccctggctggagtgagtgtttgctgagctcgggtctgtgcacgtgtccccggctggagtaagtgtttgctctgagctccggtctgtgcacgtgtcccccgctggagtgagtgttggctgagctcgggtctgtgtgcgcgcccccggctggagtgagtgtttgctgagctcgggtctgtgcacgtgtccccggctggagtaagtgtttgctctgagctccggtctgtgtgtgcatccctggctggagtgagtgtttgctgagctcgggtctgtgcatgcgtccccggctggagtgagtggttcctgagctcgggtctgcacgtgtccccggctggagtgagtgtttgctgagctcgggtctgtgcgtgcgtccccggctggagtgagtgtttgctgagctcgggtctgtgcgtgcgtccccggctggagtgagtgtttgctgagctcgggtctgtgcgcgcgtccccggctgaagtaagtgtttgctctgagctctggtctgtgcgcgcgtccccagctgaagtgagtggttgttgagctcgggtctgtgcacgtgtcccagctctgctttgctgtttgtcgttcatcctctggatcttgtttaaaaagtgaatgttagaactgaaattgactcaaagtcttccccttggtttgataaatgaggagacccaggctctaggaagtgaggtgactgttcagggtcacagaacactccctgggaatttgtcagctatcaaaatttaaactgcatcccctttgactcagcagcttcatttctagacattcatcccaaagagatacttaagcacatgcacaaagagacaggcacgaggctgtagatggtggtgttatttgaattgggatcaataaaaggctggtggaatagatcgttggttcgatcctaaaatgcagcgatgacaaagaacggggctggtctgtgtacaccggcgggatgagagcgcaggcctgtcgcggagtaagaggtagcaacacggcaagctgtgccatttgtctgatagaaaacaaaaccagtaagagtacataaacctgtgacagtggtaaggagaccagggcagtgatgaagggtgacctgcactttctgtgctctggacttaggcatttgaattgttttaatgcagatggcattcacaaaccatgcagttcacgtgttctaagtgtataattcattggttttccgtgtattcacagagttgtgcaaccatcaccactgtccaactccagaacattttgatgagatcctgttcctatttgcagtcactcacctctccctgcagcccttggcaactatgaaactaccttttgtttctgtgtattatcttttgaatgcagtagactcagctccttcatgtgcagaatgggaagccagatgaactggatcagagcatgtaaagtgcttgccgtggtgctgggcacttagccagcctccagtgaaatattaactgacattgttattattgtcatgtcctctcttcttggattgttgtccacctttttttttttttttttgagacaggatctcactctgtcacccaagctggagtgcagtggcatgatctcggctcactgcaacctctgcctcctgggttcaagtgattcttctgcctcagcctcctgagtagctggtattatagccaccaacatagccagctaatttttatatttttagtagagacggggttctgccatgttggccaggctagtctcaaactcctgacctcaggtggcccgcccgccttggcctacaaaagtgctggaattacaggtgtgagccaccgtgcctggccccaacatcttgaatagttgtatggacccgatgagagagaatgagctctctagaaatctaacagattatcatacaacttgttggcctggttgggatttatactctatccctattccttgacatgcaggggtctggcatgtgtacaacagggccatacacatttaaaaatggacatatattttccctgcagtgaacatatgttacttatataatttgagaaaataaactttttaaagaaacaaagagaaaacattataaagccatgttaaatgtaccttgttagttggatggcatccctagtgagagtgacaaattttgtctttgttgactgatacatatatatatattttttgctaagtttttacagtcaggctcaagtgaggtattggtcagtaattcagtcaggaaggaatgagagtccaatttgtggatgtttcatgggttctgagaagctagatggagtctttgcccttttgaagcttctaatctaggtagacggtcaaggtcatgatctgatgttctattaatgacttcaatgacctccaccaccattgccatccatggagcatgctttccggaccaggcacccttctgattgattcagctcttccttgatgcctcctctgatgttaacctacgagaaaggtgtgattattctctttgttctgggcaggagactgtgtgccggccagctgagccccttgcagaaagtggctgagccatgatttgagcccaggtctgtctggccccagcccctgtgccttttgcagtgttgtgtcctcactctgttgacgtgcatcgttttttagctgccccatatctaactgcctgtggtatggcatagagtcctagcattgaggcagttctgtgaaatcctctgcatgggcttttgaaattccaaggttctcttcttaagggcaggttgcacagtaatttcccgaggaaggctttgttccataaacccaggccttacaaacaacagtttccgcctctgatatgtataactctgctgctttaagaatgaattgcagaagtcacatgtgcttattgcaccaaatagaaatgctccacagggccgggtgctgtggctcacgtttgtaatcccagcactttgggaggctaaagccagagggttgcctgcagtcaggagcttgagacgagcctggctaacaaggtgaaaccctgtctctactgaaaatacaaaaattagccggacgtgatagcaagtgcctgtagttccacctacttgggaggctgagggaggaggatctcttgaacccgggaggcataggttgcagtgagccgagatcatgccactgcactccaacgagactctgtttcaaaaaaaaaaaaaagcttcacaggtttaggatgaaaacacttattatctattgatctattgccctccatatcccagggcacaacagttaacagcctgagtgtgtcctttgtgctcagacctccgtgtacatacctggatgatacctttccactctcaccaaaatagaaccatactacatgcatttctgttactagtttaatttttgaacccagatacatctgctgtttggaatgagctgttttctgtttttgtttttgtttctgtttggaatgagctggtttaaaaacagcatttggggtgatccatgataccctgtccctttgctgacaagctgacacttccttttttgggtctgtagagtgcagttagggcccagagttctttcgagcaaatacttttgcaccacttgtttcagggcaggaaatcactctgtctggcacagctgtccgcatgttttattccagcaaagaagttttcactgtcaaactgcttttcacttgggggggagaaacatgagtctaaagtttccatcgaagcctctgctgggctccatcacatgagcaggtgggactgtggctggggaagggtgtgataacagctttgattttatgcaacagccattcccagctgtccccgtggatgcgttatatatttagctgatctcttggaagcgagacgcagcttcgaaacaggtgagcagatttcttaggaaagacacatgagacatgaaacttaatggacaggtgttctgattttaaaaagagggcaggctctcactcttgtatttggcttttaaaaaattctcacgtcggccaggcacagtggctcatgcctataatcctagcacactgggaggctgaggtgggtggatcaattgtgcctaggagtttgagaccagcctaggaaacatggcaaaacctcaactctaccaaaaaaaaaaaaaaaaaaaaaaaaaaagttgcaaaattaattatctgggtttgatggcacacgcctgtagtcccagctacttgggaggccgaggtggaggatcacctgagcctggggaggtcgagactgcagtaagccatgattgtatcattgcactccagtcagggtgacagtgagacaccctgtctcaaaaaaagaaaactctcatatctttgacacttggcatgagaatagaaagtaatttctatttttctcatgtttaattctcacaagagttaccattatccccattttacaaatgaggaaactgaggttcagagaaaggaagtaatgagtccaagagctgctagttagtgacacctatagggaaaaacaaattgtgtttttcttttttctttttttaagatagagacagggtctcaccatgttgcccaggttggtcttgaactactgggctcaagcgatcctcccgcctcagcctcccaaagtgctggggttgcaggtgtgagctgccgtgtccagcttcaggttgtttttccgtttatactcacaccgctctcaacacaccatttttgccgccacacgtatgggggtttcttccacactaggcaattctccaacaccagccgggctccctacagttgaattctgacaggacgtcatagggtaagggcttagtgccccaggactgcccctattgcggatttcagttgcaagtccatgttgtcacctgtgcttccaaccaaccagcccctctggagaccgtggtctaccagtcatctcagtagcttacagaacaacacctgtcacttaggagattccaagggacttcagagctgtatgccaggaaatgttgcaaaatgaaataatatatatttgctattatgaattatagtgtcactgtgatagagccaaaatttgaacccagagatggcgtgtgtctctgcccacactactgatcatctgcaattccccatctattattgaaaaaaaaaaaaaaaaagaatatcccactcagacaacgtggttcttggtcttgttcttgagggatgcagtcaagtatgtaaattttttttttctttgagatggagtcttgctctgccacccaggctgaagtgcagtggcacaatctcagctcactccaacctctgccccctgggttcaagtgattctcctgcctcagcctcctgagtagctgggattacagacacccgccaccacgcctggctaattttgtatttttagtggagatggggttttaccgtgttggccaggctggtctcgaactcttgatctcaagtgatccgcctgcctcagcctcccaaagtgctgggatcacagtgagccactctgcgcagcccagtctgtactttttgggtagtgtttccttggcttgggtatcactggaaccccttgctttttagtggagaatccattacctgggaagtaggttcgtataatgtgtttttaaagcatttggaaaggttaaaatttatagttttcttaaattatgagtagacaaccaaaaatgttagcatgggtgcgagtgtgtgtgtgtgtgtatgtgtggcatgcaggggagtaggctccctttggtgtttaacacacggccttggatgttcccaagcgggggattttgaaattaagcaggctggggttttcatcactgggttcatcattgacagcattttctaaaatccagccctccgttttctcagctctgaaatagagatttcatgccgtggtgtttgaattctcaagtgggatggttaaattgtccaggctgtgatgtgctcctggggtcctttaggcagtagccccttagcacctttattgctgcctgtggatttgtgtttgtgctggagcccaagaccatggcagggcactggaacctccctcatcctgcaggagcagccatgtgtgctcagctgttgaccagggctgtccggaaagagcagcgcctctggaaggtgctgtagctggaggctgttgggtaaccgcattcctcgcaatggaacggcaagttatcttttggagggagatctgagctgtttactccctggcttctacctcccagcctctgcactgcatataccctgtggagtgatccctaaaaacgtccaatcatcgcacttcttctgaatcctccaggggctgcttgttttgctcagaataaaataccatagcctgcaaacccttactgtcccctctctggtctcatttcctaccaatgtctccctcctccattatcctttagccacatggggcctcctcactgttggtagaacatgtgggtgcccgccccaggccctttgcatttgcggttcccgggaacgttctctgcagggctgtgcggagctcactcccctgccttatcccagtctctgctcagacagctcctcactagcgagggctttcttcgaaccttatttaactagcacttgcaaccatcattttctcacactttaacttcctctagcccttcctctggcctggcatattaaatagtcacttcttgggtctctgagtctcctcactggaacagaagcttcatattggcactcacttttaccccccttgatacatccctgtatctctagtgcctggtacctggcaggtaatgaaccttcagtagctagttgtgtaggaactaaatgaaatacttgcccagagtcacccctgctaagcggtagagccagactttgactcccagggtctgtttcatcgcagagctccggggtcttgttgcccgtgtttctccctttgctacagtgagcacttgaagatggtggatgttactgttaggaagaccatttcctttgttggaacactgtgggtaaccggtgtcttgtagacatcattggcatctcacctggaagggtcctttctccttcggaactgtaaagtgtcccaaatttcctaagacacagaaccttgcccgttgttatgggacctgggcatacctcattttatgcatttgaatgtcctggaaaaccatctctgaatttaaaatgattctttattttcgtcatcagcatctcacactgtttgcatctgggtcatgctcagcttgttcacattgaaagcaaaacagtaacctcatcatactgtttgccatgccgctctccatggtatcagaagtttcacttaatttagacagaaaaccctatgtgttctctggtgcctgctagcaagctcagcacagtttctacctattttagacgacttaacacagatacccccaaacagatgtggccggctgcgatgagatgaaaagttatgaatgttctctaagtttagatgacctgctgatggtactgactaacccacagcttttctggaacatgaaaattagttcttgttgaacataaatgtctatatacttctaccaaacacagtctccctgtctatttgaatataaggagagaaggcttcttgtttttgccaaatcattattttcccatttggagtggaacttctataattatgccatcagggagacacaggagaaagttgctgactattcagagtataggcaggtaagtagactgcggatttttcccgtgaataaggtagatgttaactaggttgattggctcaatgggaaatcccagttaatagcatcaccatcttcacatttggcacgagattaaaatggccagactgaatcctgcttggaggctccagtgagattttgatgtgaaaatactgtgtaatctgcagtgctatgtaaattgaagcagtatcattattttgatttctgtgacaataagataggtcttactgacctatctttctacattgtgcttaaagcacaatgtaagtttctgattgaacatggaagtatccagccatgtagataaaagcttctgtcttcttggattccagcaggtgtacttttcatgcggtccttgaccagggcaaaatacaaatttctgaacactgtcaaggtaactcagaatatgggcagaaattgttaatgcatttcagattgcattgctaaccaatgtcttgaagccttctatttttgaagtcagtgtgagctatcatcgacatgaatagagaagtatgtttttctcttggggtattaaattgtcattctttccattttactttacatcatcatcatcatcatcaccatcatcatcatcatcatcatcattattattattattatttgagatggggtctcactctgttgcccaggctggagtgcagtggtgcgatcttgggtcgctgcagtttccatctcccaggttcaagcgattctcctgcctcagccttccgagtagctgggactgcaggcacgcaccaccacgcccagctaatttttgtattttaagtagagatggggtttcaccatgttggccaggctggtctcaaattcctgacctcaagtgatccacccaccttggcctcccaaagtcctagagattacagatgtgagccaccacgtccagccccgttctttcagttttaaaacccataaatcaccctcaggaaagatgcgacttagaaaagttgtagtttgatcagttgcaaatgtttgtatttattgtttaggtttgactttcagaattcagtcacaattgattctttacgaattgattggtttattggggggatgtgcaaagagtgtagaatggtgttgtcatctgttatttttgcctctcaaatgacttgacgttactcagactttaattgtgctgccttccttaatacccagatgttcttttactcccaaggcaaattgaaccttctcgacttgaaagtaaatccgatgttgtgcttgcatgaacttagcctcatgggatgaatggtctctcatgccttgaccccacatactcacctttggcagttgagagatgggagatgtctaacctgttcagtcgattccctcactttgtaaatattaatccttatgctgtggagcaacatggcacatttacctcttatttatatttatatttttatttttttgtgcatgtcatctacatgaaatgatatcaccatctccgtcacttcatggtctaactcagtctaatttaaagtggtctctcggctgggcacagtggctcatgtcagtaatcccagcactttgggagggcaaggcgggtagatcacctgcggtcaggcattcgagacccacctggtcaatgtggtgaaatgccatctctactaaaaatacaaaaaattagctgggcgtggtggtgtgtgcctgtaatcccagctactcaagaggctgaggcaggagaatggcttgaactggggaggtggaggttgcagtgagtcaagatcgcgccactgcactccagcctgggtaacagaacgagactctcaaaaaaatcaatcaataaataaagtggtctctcaagaagtaactatggaatgattaaagactctacgttggttaactattgttgtgtaacaaattacctcacagttagatggcttaaaacaacaaacatttacaatctttgtgtgggatagacagcctgggtgtggcttagccacatgcctggctcagggtctcccctaaggctctgtcatggtgtcagttggaggctgcggttgtcccaaggctccactggaggagtgtgcactgccctcatgtggctcatgggggctgttggctgcgtgcatcagttccttgccatgaggttctctccgtaggaagctcgtaagaataaatgaacaagaaaggcaacctcacacagaagctgcagtctttataacttaatctcagtggtgaaaccccatcacttctgccatagtctgtttattggaggtgagtcaataaacatagtctgtttattggaggtaagtccagcctatgctcaaggggtagggattatataagaatgtgaataccaaggggcagggggaattggaaccatctttgttgaatgtaatatattggaaccatcttttttttttttttgagacagagtcccactctgttgctcaggctggagtgcagtggcgtgatctcagctcactgcaacctccgcctcctgggttcaagtgattctcctgcctaagcctcctgagtagctgggattacaggcatgtgccaccatgcccgactaatttttgtatttttagtggagaccagggtttcacctgttgggcaggctggtgttgaactcctaacctcaagtgatccgcctgccttagcctcccgaagtgctgggatttcaggtgtgaaccactgtgccctgcctggggtccatcttcgaagctgcttactgatgggaaaagtatgatatagttaggcttaattttgtattatttcatacatggaattgaaatttttggcatgcttgctaaaactgaaccagggcagcaaggaagtcaggtagttgcaggggaaggttgactggctagttgctgagagaacttatgtaaattcatgactgtccagggtctttccccaagcctttaaggtcaaaaagcttatttctgcacctctgcccccaccagtgttgaaggttgctgattcttcttaaatatagtcctagaggggctggtgccttggggacggggctagtgccttggggacaggaggccagtggcgtgattgctaatgagatgtgtggacttgaagcgggttgaatgaattgtgatgagcaggacctccttgcagagggcagcagcctgggcctgggcaagatgaagagatcatttggagtcacgggtagagcagggctgtgagttcgccattttgcgtatgtattagcaccaggctctgctgagcagctgcagccagcttcatgctgcggtgcctgccaaggtatctgtgtcctggttgccctgccgacgggctccactgctctcttacctgacttttctaagtcccatggctaagtgcaggctcccctcaaattctgattacatagtttacatatcactaacatataatcatagtttacacataattttgtttgtgtctttaaatcaaaactttgcaggtacatagataaagtcattggttctcttagctttattacaaaagacaggaggcctctggctgtcactgtctcccacttgccacccttcagaagcccctcttggaagcttttccactcatgctttgggttgttgcctccatatctctgatcaacacgcctgttgccgcttttttatttttcagtttttggaattacttatttctcatcgtggaagaggaagggtaactgtctttgactgctccacctccagaaaacacacgcaacacgcagctccccatcctctggcacagtcatatcatcattttggttagatcagtattcagtgattacattattataactggaaatgctatctacagctgtgaagtgcatgatcgtttttcctgcacgatctcttgatttctctggtgttaatacttaattcaactccaagttcatcctcagtgtgttaatccccctggtgccttcaggcactgtaggccgcctcccgcttgcacccaaggcagtctctcctggtgccttctggcctactctagccagaagcctgctgctggtgggcccacactctccaactcactttttttcttaacagctttcttgagatataatgcacataacatactgttcagcctttgagagtgcataattttagtggtggttttttgttttttgtttttttttttttgttgttgtttgtttgtttttgagatggagttttcctcttgttgctcaggctgtagtgcaatggtgggatctcggctcactgcaacctctgcctcccggattcaagtgattgtcatgcctcagcctcccgagtagttggggttacaggcgcacaccaccatgcccggctaatttttgtatttttagtagagacagggtttcaccatgttggccagctggtctcgaacacttgacctcaggtgatctgcccacctcaacctcccaatgtgctgggattacaggcgtgagccaccaagcccgaccctcagtggtttttatattcacaaattgtgcaaccatcgccactctctaattccagaacatttttgtcatgccccaaagaagcctgataccctttagcagtagggtcttcatccctccttcccccagaccctggcaactaagaccttctctggacatttcgtgtacgtgggctcaggtaatctgcagcctttcggatctggcttctttcccctggctgaatgctctcacggtctatctgtgttgcagcgtgagtctgctcttcattcctctcatggctgaatagtacaaccctgcatggctagaccgcatcttgttcacttaccaggtgatggccatttgggttgtttatgcttttttgttactatgaagtattctctggctcccttttgtgttgcatcccctatatcttgggatctatgtattacgattgctagaattcttcccttctttatgtgcggggtaaagtttctgcacggtcacatgtctgaaaatgcctttatcctgcctctcacgtggcttgcctgggtgtataaggctcaaaataatttttcttcagaatgttgaagaggtttcttcattgttttctagctttccatgttgctgtttagaaaccctatgccatttctagtttttatcctttgtaaaaattcttcttccacttcagaagttggtagcctgtcttctctgtcccctgtgttctcaagtctgtgagtgaggcttgcttttgtccattttgctggacattcattgaactcttccatcctgcccctcgtgtctgttggctctgaattatatctttgatttcctcttctgtgtgttatctttttctcctttcttgatctcttctccatttggacttgtagttctctattctccccacctcttttttttttttttgagacagagtcttgctctgtggcccaggacggagtgcagctatgccatctcagttcactgcaacctctgcctccgaggctcaagcgatccttccacctcagcctcccgagtacctgggactacaggcatgtggcaccacaccatactaatttttgtggtttttgcagaggtggggcttcaccatgttgcccaggcttgtattctattttgttattcgttgcctctattttctggaaattttgctaccctttcctttgcagtccctgttctatttctgctgttatagtttcactctgtaaaagggcttttgtgtgctttgtgtttttctttttctcctttttaaatatctccgtattcttatttcatgactacactgtctcctcctctctctctggaaatattacccacagtttgcttttgaagtgttttccctaaatagtctctctttcctgcaagttgcttttctctgtttattcctgtctcagtctttcatcttaggtgcttttctcaaatgggatgtgatttctagatgtctactcaggtgttggaatggggttagaaattgatccaaagctccgtgaactttgactttgggcctcttggggtgatctggctgtgccattccactggagaactacccctggtctccaaagtttttttagattcctgggagaatacctttccattccctggcttagaggcacatgctgtctgcctgctcttctgggaatgagtggggctggggagagggaagaagaatgggagaaactcagaagttcagtgtgtgttacttttatgtctccattaaaaaaatggaataccctaacctcaactcagtccagacctactgcgttttctccagagaataaacatgtatattttgctaatcgcttcttaaacagacttttaaaacctttcttttgctttctagtcctgtgttcaccgtcatttccagaggtgtcttgtgctaacagttcattagcgttttatgaatcattccattctcatcagatattattttggtggcatccatgtctgtttaggaatgaaattttctcaggtctgtcaagttatttatcagtcatctacctgattcttagcttctgtaattttgttttttttgtttcctctccaattcttttttttttttgtgagcgatgtctttataaaaacctttttttgcttttattgttatttttgacacataataaattgtgcatatgtatgaggtagtgtgtgatattatgatagatgtatacaaaatttaatgatcaaatctgggtacttaccatattcatcatcacctcataggaaacattttaattgtttttttttttttttttttggggggcgtggtcagagtcttgctctgttgcccaggctggagtgcagtggcaccatctcggctcgctgcaatctccgtctccctggtttaagtgactcttctgcttcagccctccgagtagctgggattgcaggagcatgccaccatgtccagctgatttttgtatttttagtagagacagggtttctccatgttggccaggctggtttcggactcctgacctcaagtgatccacccgccttggcctcccaaaagtgctggcattacaggtgtgagccaccgcacctggccttaattgacattttaatgggattttgagaggatgtgagtgtaaattactgtgttcaggctctcatctttacagagttcttcacagtttttctttccataactgtttggggttatctgttgtgattgggtcactccctgcattcgtggcccaggactcagggcttctttctgcgtgtttcctgctgtcactcagggtcttgagccttcggcgggctctaacagtgtggtctgaggaggcttagccacctggcttagttgcatcagttttgactcctggttttgctcagccttcctgactttcaccttcttcctgaaggctacccgcatcactggggggctagtctcagatccttgtttagcctcactgcccctccatacagctgatagggcatccaagggatttcttgtcccagaacacacaggaaactgatcctgcatcattgatgcttgttttgaggcttgaggctaatccacattcttaaacatgctgtggatgtttttctttgcccttggtgtgggaggtcttccctgttcttgttttctgcttttcttggaactatctggttcattctcagcttttctttatttgtttttccctgcagagtgggcatatatgggcatatacataatcatggaaacactactcagagccgtttgtgtgcatgcttgctctgacctgggagccagtctctttaacatgtcttttgcattgacgttctgtgttggtttccgagtttttctaaaggttttcttgctgtcatcctaagtatggtttataaataccaatccttggttttacacatactctgacccccattagtgctccacagctggctgtcagcaggccctacctcactggatcacttttttgttgtagaaaaaggaacttggcaaatataaaagatgtaagtggactgaatgcagtggttcacacctgtagtctcagcactttgggaagctgaggagggaggatcacttgaggccaggagtttgagactagcctggtcaacatggtgagaccttgtctctacaaaaactaaaaaaacaaaaaaagaactagcctgctgcagcagggttatgcctacagtcccagtgactcaggaggctgaggcaggaggatcgtttgagcccaggagttcgaggctgtagtgagctaaatgattgattgtgccactatactccagcctgggtgacagaggagaccccatctcaaaaaaacaaacaaaacctccaccccccaaaacaaccagctcttatgtcttgccaaacctgccaaaacattgcctgttttctcctgaaatggaaagtagtgacaagattatttcttgactcctgtgcttctgtctcatgacagttcttgcattttaaaaatacagcttatcgctttttatttttttaagtgacaaagtctagttatgtcacctaggctggatgacagtggcacaatcatagctcatggcagcctcgacctcctgggctcaagcgatcctctcaactcagcctcctgagcagctgacactacaggcgcacaccaccattcctggccttgtcactcgttttattgtacttaggtgaaaatgtcccattgttgaagtagttagtaagtgtgtgtgtgtgtttttcttgagagctttttcagtctgaagtcatctgagaaagaagaattttttctttttttactgggagaataattttcgatactgttgaaatatttatgacatgtctctctttctctaaagtgccaaatctttggagtgttgatggagaagttacagtagctgaacagaagccgggagaaattgctgaagaactcgcaagctcctacgaaagaaagctcatcgaggtaaggccggtggagtctgtgtgtctttgtttctgatgttggctgcgttggagactttccagggtaggtccagcctattctaaagacacgtgagcaaaacgaccaagcaactcctcagccccacaaaacaaagcaagaccaaatcagtgtgctttataaaaagaagtatgagctgatcctttgaaaaatgtcacttaaatattggaactttttggcacttatgataaggacataagagaaaacatatatgtgtaacattaaaaataaaacaattgtaagatttggagatgaaaacagagaatatcacatgcacctttgtgctgttaaatgtgaaaatatggatgaggtgaactatttttcagaaaaacattcattatcagaattaattgaagatgaggcaaactggtcgaagggaccccctcaccctcaaaagaaaagaaaaaaaaaaccaaaacattttggaataaagttgtacaaattactgaagaactgcttccttagaagacagcaagcctagagggtttcatggtgatttctaggaaactcttcaaggtaatacacaaagagccctttgctatttatatttcctgagagggtttttatacgtctctatcttggttcaggtatgcattactgtgatataaaaaaatcctgacaaagatagcataaaaaagaaaactatcaaatagaatcatttgtgtataagatgtacaaaaattctagaaagtcattactcaaattcagtcgcatattaaaagaacagtgcacataaaacatagggtttatttaggattgcaaggatggctgcatgttgggaaattcatccatgtaagtcatctcattagtagcctcaaagaggacaaccagataattatcttggtaggaaatgaaaaatcattttataaccttattgatacctgattaaaaaaagggtaattcttggatatgataaagaggtttttcaaaaaccattgatttattaccatattcaatggtaaagttgagaagctatgtttttgatgaggtgtgtgtacatgttgtaatggtcccttggtggtagtattgtaagtcatgtctgtatgtacatacatacacatgctaagtatacaagcaaactttcggttctttctaaatcttctacagtgagttttattttgataatcaagaagacactcgctcattgctgtgtagacatacctgagcttgggtgggtttcagaggcccagggccttggagggtgttcccctaagttcattgctggtgcaggctgccattcttaccatctgttttgtctggtctctaaattgcctctaaagaaggaaggtggctttagaaacagcttgcattctaactcaggtgagctcaagggaaggcaagctgaggccttaacacacaggttggtggggatgagtcaaaagccaggctggggaggcctggggacagggcactcctgtgtgctctctgcccagtgctctgcccttccttgggagctccctcagtggggctgtgagactcagacttggctggtggcagtgccagggttctgggccatgagtctgtgcccggaagtcccaagtggagagggaagcagggccccaatctcaggattgggacgacttgtgtcaggattcgaacccctgaaaggtaggactgtgtctttgccacctctgtacgttccacagccacttattggcaaatggtaggtgctgcgtaacccttgaatttttaagttctcctgggatggggatgtctggatttactgaatgaatgaatgaaggcctgatgagctagagaaggtgaaagggttctcagaatgaaagtgcaggatgaaaggttctgttcctctgggggaacaagggtgctgtggtgaggactccatcagaccagtgcagctcagtgagggtgcctacttcgcagggtccacaaaggcattgagtgctgggtccaggcagcgctctccgtggagattctccacctgtggggctgctgggcagcgtgtaggggtggggtgggggtgtttgaccctctgattgattgggtgtttgaccctctgagccaagtgccactagttcattcgtgggccgggtggttggatgatttatttcagtgtttatgagatgcctgctttctgcatcagaaacagcaagaacagaggctgagtacaaggaaagcattggcaggaactgaaaggagactcacgggtcgggaacagagtagatgaggggagaaaggtgatgctgtggctgtgtcctggccgtgtcaccacccgctttgctttgaccatgtgaaaatctcatcccctgctgtgctgacctgagctgagatgtgtggagaggatcaggtcatgtggggagttactgcagggtccacctgcctggccgttctggccagctgtgagagggtgagtgtggaaccaccaaacgggagggctcaaggttgaggcatgaaggttcgtcttactggcctcaagcttcctttcttttccttcttgtttgttttttttatcccgggagcagtagagatgctggctgtggtcaacgagctgagagaagtgtgaggttgaagcagacatgtcctcaaacggcatttactgcaccggattgatttttccttcttttttggttgcaaagacaggttctgccggtgatctttcatctgtgaatagcattagcatttcactacaccaatacttttgctgttaatcgagaccctcagaacgttctttgtgatgcttctgtcattctgttaatgggttgatttttaccaaaatagttgtaaagacttgttagagtaatgaacgaatgtgaggggaaaagttgatatagtttctttccgtgtcagaagggcaaaggaagaagaagaaacattgtatttatttagttatttatggagacagggtctcagtctgtcgcctaggctggagtgcagtggtacagccttggctcactgcagcctcaacctccccggctcaacggatcttcctacctcagcctcccaagtagctgagactacaggcatgtgccactattcccagctaatttttttaaatttactttttctagagatgggatcttgctatgctgcccaagttggtctcaaacttgtgacctccaacaatactctcacctcggcctctcaaagtgctgggatcacaagtgtatgccattgtgcccagtccatctcattttagataataaggatatttggaacaccttaaacatggtgattcatcccagtgcgaagggagtttctgagaatttttttatctaggtgtctttgagagcatgaaagccaactcatctatctgcacatacacactacacatttgtgcttggtgacctggaatccagtgtcctggacagcacagaacctaaagtcggtgccataaagccctctttaaatggctggtgggcatcttgtgccaaggactggaggtataaaaattgttcctgacaccctgtggttgttaactcaggaaaacaaggaggacaggagaattctggcaggtatacattaatctggcaagggtaaaagcactagtagtatcacagcccctgtaatactagcagcagctgtcaggtgagtactgttagatccaggcactgtgctggggtttttacgtagatgaacatatgtgatcctgagaagagttctttgaggaggacactcttgctgcctccagttcacagacaaagctttgggaagtttagtaactttcccaagagtccttagctgctaagaagcagagctggggctgggcgtggtggctcaaacctgtaatcccagcactttgagagaacgaggcgggtggatcacttcagactaggagttcgagagtagcctggccaacacggggaaactatgtctgccagatagaatctgtttccattctcaaaaattagccggtcatggtggcatatgtctatagtccccagctacttgggaggctgaggcagagaatcacttgaacccgagaagaggaagttgcagtgagctgggatcatggctctgcactccaacctgggcgacagagtgagactccatctcaaaaaaaaaaaaaaaaaaaaaaaaatgcagagctggatttgaatcctcacagttgagcaccagagtgcaaacccacaactctctgccgtgctttggaaggctgagctcattgaagaagaaggttaacttgacggaagagacgatcactaccgatgttcaagagaatgaatggcaggacacaagggggaaaactagtagtagataacagcaactgcagcaatatcagccatttgagatggcgctggtggtggggacatcacaaaccctttgttactggagaagaaaggggaaaagcacatcttgtctgtgccaaggattacctgcttccaaagcaacttgtagcagaacagcagagtgagagttcctcgagggcagtgcggacattgtcttttaaattgtatcttcattgcccaacccatctccagcatatagtaggagaaacataacattgaatagaaggccagcctgttgagtggcttcagtcatcttgtgtaatgcgtaaagaatgataaatgtgagtcctagaacctcagattgggagtgaattgtctaaggcatcacaattaagtatttttttgttttgttttttgagatggagttttgctctttttgcccgggctggagtgcaattgcctgatctcagctcactgcaacctccccctcccaggttcaagcgattcttctgcctcagcctcctgagtagctggaattacaggtgcccaccacaatgcctggctaattttttgtatttttagtagagacagggtttcatcgtgttggccaggctggtctcgaacgcctaaccttaggtgatccgcctgccttggcctctcaaagtgctgggattacaggcgtgagccactgcactcggcccacagttaagtcttaactagagctcagagcaacctggtagaaaggattagatagctaataagagcacatgggttctggagaggaggcacactttactctggcccttaatgttagcaggaggcatagcttggagagcctggggacaccattgagtaatagatggtgccaactcaatttgtgcacatccattgagcgccttctcagtgtccagcccttagcttcctttctcctccctttgtggcttttcttaccctgggagcagcagtgttgatggttgtaggagatgagccaaggaagttgtgaggttgaaacagagacatccctgaaatggcattgactaccctagatggagttgttttttttttttttctttttcttttttgagacagagcctcactctgtcaccaggctggagtgtagtggcgtgatcttggctcactgcaagctccacctcctgggttcaagcgcttcttctgtctcaggctcctgagtagctgggactacaggcacgcatcaccatgcccagctaatttttgtatttttagtagagatggggatttcaccatgttggtcaggatggtcttgatctcttgacttcgtgatccacccacctcagcctcccaaagtgctgggattacaggcatgagccacttgcagagcgacttctgttgcaaagtcattggtgtttcatctgtgagttgcattagctcttcctcatgccaagagtggtcctaagttacaaaaatgaatgggacgcagtgcctgtgtttagggagcttgcattcttgtgggtgaggcagacgtgcctgttctaattgtcaggacagataattgaagtgcagaggtagggttatacccacaggcctggagctgtgtctttgacggcagttctgcagaggttggcacctaaccacagcttctttagataattcctccccacttcttagggactgttagtggtgatgctcagaatttcttctgtaaacttccccatgcttcttgaaattctaagacaccagaacagaaacaaccaaggttttgaagataagatattggacacatccaagattgatctcttctgagactcttgcttctttacctcttttaagtacatttcctttggtttggactcatcttcagagatgttctattctttttcagcagttgtcttcacaacaatgtgaagtgttggcgacattcggactttgggcctgcatcactttgtcgctgccttctgcagcctggtgacttggaaagcacatgtatcgcgtgtcagactgagttcagatttgccacttactgccgtatgttcctgggcacgccccctaacctctctaagcctcaagttctctgttagtgaaatgcagccagtcatacctgtgagtgggtttgttttgggaatgagacataagaacccagctgagtgcctgcagtagacaggaggtgtctctgtgcttcctcttctcccctccatcctgactttctttggagggcttccctctccaccatagcgtgctgtctgggtgggacagtatgtccaaatgctttgccctggttttggttcagggctgggtacatgacctgagctaggcccatgggggctttaactctggagttgtataagaatgcagcaatgcttgggaggccgtttattcaatagcaattaacagtaagcatttattcaatagactaatagcaatgagtctgataagactctaattgttttctgtgttgaacttgccagaactgctttggtttcggttccttttttttttttcttttttttgagacagagtctcattctgtcacccaggctggagggcaatggcacaatctcagctcactgcaacctctgcctcccaggttcaagcaattctcctgcctcagcctcccgagtagctgagattacagatgcgtgccaccacacccagctaattttttatatttttaacagagatggggtttcgccgtgttggccaggctggtctcgaactcctgacctcaggtgatccacccaccttggcctcccaaagtgatgggacggattataggcatgagccactgtgcctggcctcagttacttttctgagcctgatttccccacttttctgcctgtttatagtgaattctattttagcttaggttagaatctgtttattttgcttaccagcggtgctctcacttaggtaaagctttgtatccgtatgtaatcagtagatgccgtttcccttcagttctccttccactcactgtttagcagggcttagctccctcatgttgtcttcgggctctcccagctcttgcttgccggcaccgttttctagctgtttgccccacttgtgtatcttctgcttcaatattgccagtccatcctctgcaaacagaactttactcccttccatatggcagggctcagctagctgatgattgatttttaaaattataagacacttatcgtttactgtctgagtgtggttagtccctgaatttttcttgtgggtaaaataaatggtgtattagcaacatttgttctcattataatggcagagtcgctattaatggaaaagtaagcttgaacatcaagctggtaaaaaatacactcataatcacacgctgtagataactgtgaatgtgatcatcattttaataaagtgtaaaaattccggaagcagccaggaccttgggagcagttacaccaccagtgcctgcctcataaattggcaccaatgggttccaacacttctcatgcgtgtccaggagtcatttttgtataagagcagcatgggcttttcaataaaatactggattttttataaggactcaggataaaaaactctgagctgagatctacattaaactgatactcaaaatgaaaggtatgatgttaggtttatttatttatttattttttatttttctgatggagtttcactctgttgcccaggctggagtgcagtggtacgatctcagctcactacaacctccgcctcctgggttcaagtgattctcctgcttccccctccacagtagcatacgctaccatgctcagctaatttttgtatttttagtagagacagggtttcaccgtattggccaggctagtctcaaactcctgacctcaagtgatcctcccacctcggcctcccaaagtgctgggattacaggtgtgagccactatgcctgtcctgtttgtttttttttttaatcacatgaagctgagtggattgagaccaggctcttacctcatatagtttgattaccaagcaaaatggagtgtttaagtgtctcctatatatcagtgaaaaagggtaagaagttatagtttctagcaggataggtgtaattcccactgaagtgtgaatgactaacagggctaaacctccaaggatttttttttttttttttttgagatggagctttgctgtattgcccaggctggagtgcagtggtgtgatctcggttcactgcaagctctgcctcccgggttcatgccattcttctgcctcagcctcccaagtagctgggactacaggccccaccaccatgtgaggttaatttttttgtatttttagtagagatggggtttcaccgtgtaagccaggatggtctcgatctcctcacctcatgatccacccgccttggcctcccaaagtgctgggattacaggtgtgagccactgtacccggccccaaggtgtccttaaaatttttttattatgtaaaagttgaaacatatacagaaataaaagtgtaatgagcctctatgtacccatcacctggctgtagctgttagtacctcttggccagtcttgcttcatctgtatcccgtcccacccatcaaacctcagcctctcatggtattttgaagaaaatcccaggttccatattattacattcctgagtatttcagaatctatctttaaaagataagaggtcttttaaaaaccccacattactgcaataccatagtcatactttaaaaagcctgttaaaagaggctcgtgctagtcccattgattcttgggttggagtatcagggagaggagcttctttaagaacgtcttttagggggcccctggctcactctttctccttcccagcttcccgaacaaggaactggagcatctcatttatgcaagatggctaagctcggagcttttctgtcttttggatgtgccctttgcttggctctctgccttgacttcagttaacaacacacatagtcatgtcagcagcacactacacaggccctgggaaagtgagggatttggagatgaggaggtgtgaccacagcctgcaggctccaccagcgtatgggtttccagcctccagcatggtctcctttacaaacagactccttccctaaggaaggtctctgaaggaagaggaggcaggctgtatctcacaggtgtctctctgttttttttaaattttttttttaactggtaaaaagtaggcaaaagagcataaagaacttccatatactcatcaccctacttcaatagttatcaactcttgtccagtcttgtttcatccacttaccctcctgtttccccagcatcaagtagtgtttggaaggaaatccaaagcacaacgttgatttcacccataagtagttaggaatatattggtagtaaactacaaggactgtctttttaaaacagaaaaaactctgtagtatcattatcacaccctaaagttagcagtaattccttagtattgtcaaatatctggtgagtgttcaaatttgtagtttaaacaggtgtttgaatcaggatcccagtaaggtccccacctcgtgattggtgatggatctcttcagtgtcttttaatccatatgttctgtcacctgtgtctccctgcctctccctttcttccttacgtgtcatttattagttgaagaacctgggttgttgatcctagagaatttctcctaccagtgttttttgagggtgtattacatgtgtggtacttggtgacctgttaggtttttcatggcattttatgaaaagcagctatagatattgatgtcacagcctgggcaatgtagtgagaccctgtaattacaaaaaaaaatttttttaactagctgggtacatcagcatgcctgtggtcccagccactcaggaagttgaggtgggaagattgcttgagtccagaaggtcaaggctgcagtgagctattgaagtaggaggtgggacttgactccagaggcgggactcagacactggaccaaactgactactagctaaaacaggactgggtggaagcagctttccatcagacatgcccgtgggtgccatgtcagtttaccattatcatggcaacatccaggagttacggcccctttccatggcaatgacccaatgactcaaaagttaatacttcctctctagaaatttctgcataaacgaccccttaatctacacataagtaaaagtacctacaaatgtgactgcaaaactgccctgagctgccaccctctgtttgcggggtcaccctgctctgcagcagcagtcccggagctgtaactccactggagctgtgacaccgccacttcaataaagctgttttcttctacctccagcttgcccttgaattctttcctggacaaagccaagaacccttgcaggctaagcccttctttgggggcttatctgtcctgcatcactatgatggcaccactgcattccagcctaggtgacagagcgagacatctggggaaaaaaaaaaaaaaaaaaaagataatgaaggtaatagcagttagtgcaaattgaggggctattctatttttaggcactgtgttaattgcattacatggactgtttgattcattgttctctgcatacctacagatgatgaagccgaggcttggaagggttaagtcacctgcccgaggtcatggggctagcataggtagaagcaagatttgaccccctgactgaccccagagttggtactcttcccatcgccctctgtggccttctctgtatctgactagaaacaggaatcaggcctgccttgcctactagctctaacttttagttctaagtggagccaggaaaatgaatgcagtgacaaacatgctggctattagcttgtcaagaactagaacgatggaagagataaggagggaggatggaaacagattctagctggcgacacggtttctgatgtgagcacttactgggtaaacagccgtgtgtgctgccttggatggcaggccccttctgatgcctcttgtgctcactggatgttcccatctgttcctgtgtgctggggttatccgcccatgcagcaggaggagaagggtccactactggcactgtcttcttctcaagggctcttccttcttccctcctctcccttggcctctcagttactgtttgcatttgcctggggcatgttcaggtgcaggtcacaattgtgcctctgtgcaggcatgcttgcgcccctagccttctagtgtttatccttgctgatcttttgatttctctcacagaaccttggatacctcgtttcccatttcctggtgaggtcaccaccctctccggtggtggcgctgggccctgatctttgctgtttctccaccccatgtgttctgtttcgcttccatttctgctgaagcctcatttccagttgtgcctctgatctggaagtctggagtacttgcgaacgaacagatgaacttccttagagaaacacttggaaaatgatccaatactcctttttgggcgatagataaaaatacttgtaattatagtggctggttttcagcttttcagacccacactattttgggcctgttttatatttgccttcctctttgaggcgggaagtggcttcaagaagccacttctgggtccccagaaggagtcgtgtggccttgatggacgcgagtgaaagagatgtagtcctgtcaaggttgggctcagagttcagtatacacccggcgaaggggcagggctgtcctgaatgctgcatgagctcagcctgcaggcaacataaagggctcgtcactggcagtgtggagctggagaaacgggatacagcgggagtggagaacgctgagacagggaggagggagggacttgttgcatttaatgcatgtagacgggcaatgacaaactactctgggcccagtctacttgggccatttctttttctgcttaaaacttaccagtggctcactttagcatttaggttcctgtaaaagtaacatgttcacatgttaaagtaagcctttttgctatactcttgccttcctcttcagtcatgcttcttaccttgctctgagcatgttttcctttctcaaatgcacgtgttctcactgcagaccttcacacaggcaggtgtaaggtcccacctggaaccctgttctttttttatgaaccctttcctgtccgttttcgctggctgacttctgatctttcagatctcatcctggaagccttctcaaatcaccccactgcactcttgaagactgattcagtttgccccaggtgtcctgcacgtcctttgtgtcacctctcctaatcctcctagtacggtgtcgtgaatgtgtcccatttacctgtgttcatccttcatgacctctggtacctggttgatgcttgtatgatttaataatttttttggttgcagaataaaaaaacttggctcaagctgtctgtgacaaagactgtgtgatttatcaaggtctgtctcatttttctttttgtagacacataggacagatgcatttcctagtctcctttatgggtagcttgggactgtgtgactagttttggccagtgggttgaaagtagaggtaatgagtgttatgctagactgaggcataggagagtggggatgagttttcttggttcttgctcccctgccatggtgattctggaagctttgtgttccatgatgcatagctagaaaatgatactgacctggatccctgagtcactgcttggaggagagtttctctgttgtgttgctggatccactatagactttttaagagcaagaattgaatggtatctattcagcttgttatttaccactgagtcgagcctgtcgtggtaatctcgaggaaggtaatcctttggcctcaggaaaagtctggctttagctgtggcaaatgcttgatacttgagctgtgttacgaggctcctgtttctctctctttagtgctttcctcttccctttctgggttgacatcatttttggtagctgttattagtccattgtcacggtgctgataaagacatgcccaagaccgggaagaaaaagaggcttaatggactcacagttccacatggctggggagacctcacaatcatggcagaaggcaaggaggagcaagtcatgtctaacatggatggtggcagcaaagagaaagagcttgtgcagccccttatacaactgtcagatctcgtgagacttgctcactgtcacgagaacagcacgggaaagacccgcccccatcattcagttacctcccactgggtctctcccacgacacgtgggaattgtgggagctacaattcaaggtgagatttgggtggggacaaaggcaaaccatatcagtaggttttcctcctcagggtcacagatggctgtgatcacccctgggcacatagtttttcttccaggttcacattcataggaaacagcaagagtctctccatgcttgtcaaaaaccttatgtttactctgtagagttaacttaggttccattctctcttttcagctgatcacaggatctggcttgtgctaagacagggaagagctccattgagacatggagaagggagattggggagagggatggatccccagatgaaaactgggactgttgctaggggaagcggatgccatggtggcagaaaaccaaggttcacttcagtgctcagtgcatgaatgaatggatgagtgagtgaagagtgagtgagagccagatcagtggatatattgaagaatcagccctctcccttgccttcgggggctcacagcctactagtagagttagcgtcataaaacagtaatttttagcagcaagcaatcagtgaatcaaaagaagagggaaattggcgctgtcagatctgctggtggaggggttgtggtttggggtgtattagacaagatagtgcagaaatgttcatttcgaagctgggctttgcaggtagaataggaccttgccagtgagacagggtggggaagggcagtccagatggcaggaacagcaggtgcgaaggtttggccacctgggcgtgtcaggtggcaactgactgatagaccgtagagtgagacagaggcaagacgcctccatagttccttttttagcactgtttgtcattcctactagagagagtcttttaggtttcagatgctacaattaatgtttctttttctgaaagtggtaggattggaaagttctcccttttcctcgttttttctgtgtcttgattctccctaacacaggtgcatgtggagagctgcaccttcctcccgtggccgctcttggcctttggataggaatttcctcttaagtccccagccagtcatttcagacccattgaggaagatagagttttgtcaggtcagtggtgctgagaggcttctgtttcttaaaggtgctcttctagttgattgtaaggggcactgccagaagactttcagcttgaatggcttgtagcagtttggcttggaagacatcttgtaaaaagcgttgactccaggtgccccgccattttagaaacatcccccgatatgtaatagtgagacttaggactttgcttctaatagtgtgatattcttgtttgtttaatttgaaggatctaaaaccttctgttgcctccctgttctcttcctctgtgaggctgatacaaggcacagtggctctagtgttagttaagcttgtaaggatcagagattttactaaccttgtttaagttcttacagaagaatttttgctaacgtccagctgaggaactttcttatgtagaataaatcaaaattttcaccagagtagttcactcttattaatgaatgaataatgaatagacaaattatttaaatctaaattaatataattgacaccatttaataagcatgtactatgtgtcaaacattgcaggggcatcatatacatctttttattactatacatatattttcaaagagatgcggtcttgctatgttggccaggccagtcttgaactcctggcctcaagtgatcctcccaccttggtctccgaaagtgctggggttataggtgtgagtcaccacgcctgaccccatcatatgcatcgtgtcatttaatcttcacgacaaccttgcaaggtaggcggtggtggatgctgaggctcagaaaggttgagtagaatatcccgagttgcatagtcagcaagtggcagagctgacgtctggacccagttctgataacagcagtgactgtgatcctgctttcctgctgttcagacagtgtgtttgtttccgaagattagccagcctgcggtagaggttaagctcatcgtttctgtttcctgacacattttatgactgtcttctggtggaagacgtttctaaagcctgaaagagacttgaaattggacttggaatgactttgaggttttgtagcttctcctgattgattacagtgcaaattaactaaatgaattatttagctcaactaatagcgtgctttcatccaatagcttggtagaaagaacatattgaacattttttacttaatccactttgggggaatatttgaacagattaaaaaaataaagtacaaaggatcttttttatcaattaattttgagccattctgttcttttggaaagctgcagatatctttctcaatgattgttaaaatccttatcaggctggcaagcttgcattcattcagtgcttatacggtgccaggcatattcctaagcactttatttatctcatgtgatccttatagctactctgtgtggcggtattactctcatcctcgctatacagaggaggaaactgaggtgtggtgtgcttactgatggtcagggtcatgtaggtgctcagattccagacctgaagctcacagccactctccggggaggagaactttgaatccaaacaccaggagatgacggtcagtccccactgctggtcagaatgtgagaatcgaaatcctagctctaggcgcatgcctgggccctgtcacctgacctctgtgagcctcagatgtctgcgtctatggcctgggaatcatcatttccaatgtgtagcatttatagatcaagtagggagttgtatgcatggctcctgtcacccgtcatctcttgggtgaggtgcctgctgtgatggggaaccctcttgtctcatttgcctgttttggggacagacagtgtcactctcagtggaacagccctcagccctgtcatgtacagggtcactggacatcttctctcgttcctccctccgatgggctgagaatggcccggcatgcttactcagggagaatgagtcttcttggtttctaaagactcaccctgtctactcccaggcctgggaagtccatagtcacccgcctccctctgctgtctgtctgtagcattctggatggctgtgggctcatgctgccgccatcatggttccctgttagctggtcccgcctccctgccctttgcctatgctcagcggggagcacagttcctctctgggtaggttcaggtcctttcagtaacagctcagacctgcctatgtccccaggctggctccttgcctccctactggctgtctgtcacttggctgagaactagagctgccctggacctctctgggcctttgtgttcaggcctaacacagctggagctcccgggaagagatgactgtcccttcctgtattagcctgttttcacgctgctgataaagacatatctgagactgggtaatttatttaaaaaaaaaaggcttaatggagtcacagttttacatggctggggaggcctcacaatcatggcagaaggtgaaagacacgtcttacatggcgtcaggcaaagagagaatgagaaccaagtgaaagggatttctccctataaaaccaacacatctcgtgagacttattctctaccacaagaacagtatgggggaaactgccccagtgattcaattatccccccactggttcttcccacaacacatgggaattatgggagctacaagtcaagatgagatttgggccggggcacacctaaaccatatcccttcccatgtccttgcttctccacttctactcgtcccagggttgactttcctaggatgacaggcagcggggtcaccggttccctttaaggatacgcacaccccaccatggggcagtgaagccagcctcccaggagaagttgccagaattcctgaacattccttctcttcctaccaacccaaggactttttcttgccaagtcgcccaccactttcttagttttgtttttgagaaaacaactctcacaacttcctttgtggctaattttttcccatcagtatcctgctttttctgcagcttccgttgacgaaggtacattttacctctggaaccggtggagcagagagctgaatataccctgtttcctcgggcttccttggagtgactcacaggttccattttcagtaccaaaaactcagctttgccagggcaagctctcagcaactcttttacagtgacaagtactttagaaaagtttcaattcacttatttctctgggtcacacaggcaactctctgccctgctttgagcaaagactatttctttagcaaaggatattgaaattgggttctttttttttttcctcactcccttcaagtagattttttttttaatccatttttaaggtagagaagggagatgagtcttataaaaacttgaaaactgtcttttgacaaagaccaacttctgcgcccagcgctttcatctccaggtgcctgagattaacgtttccaaaaatgagtcttttaaacagttcttctcctcaaaatgaaatatgttctgtggtaacaacccagttcctactatgtaatatgtagaaatcattttccctttgtgaagaaaactagatttaaatgctaacatattatctttttgtcttcctgaaaaatttttcttccttcggtggtaaaaagcttttaaagttaatggaaaattctccccttcctgtgctctggctcgggaggagagggagataacagatctcagtttctctgtaaatatcataatgactgccttcctggtgttagaggtttgaactgctgtgatggcatgtattttaaagcaaagtggtggtcaattttgatgaaaagtgataaaatcgagtggataaaattggctttcagcaagtagaatgctctgcacctgtaagtttgtgcccatggcccttatatatggggagaagaaagaaatttcctacaatttttttgacacatcagaattataacaatttgtttttggtgtagcacttcacatgtcttgatcattactaggccagcagacttttttatataaagggatcaatagtaaaatctttcggtgttgtgggccatgtgatcccctgccattggagcactgaaacagcccaagacaatttgtaaacatggttgtgtgtcaataaaactttatttaccaaaacaggcagggggcctgcaggtcacattgtgccaatccctaatgcaggtacttctacttagtgatggtggtgatgctgacagggatggttataccattagtatcagctgctgttttgagtgccagtcatgggccaggcaatagatacatttactgctcataaacactttaatgaagggtaaacgtggttatcgccacttaacaaaggactaaagcgaggcccacctaggtcaggtgacttgctctatgccagggttctcaaccccaacactattgacattttggaccacataatcgtttgtcatgggggctttcctgtgtgtagtaggatgtttcacggcatgcctggctgctgcccgctagatgctggtggcacccccttccccacaactgtgataatcacaaatgtctccagacatggccacatgtctctgggatcaaaatccctgctggttgagaaccactcctctaggatataccacttttttccccccgctgcagaaagaagacagggttaggggtcggaggctggagacaagggcagaccacaccagcagctgcactggggcggaggccacggcacctgttggggtctgggtttccccaccacacacggggcagtgtgcggtgagctgaggccctggaggctctgggccttgaatctcacctgctgccatggccaaagcctgggagtgattttcaagtaatgccagtaggatgtaccacttcttaatgtcaaaatctgggctggaaagatggtctttatgattttgtttttttgtttattggtttgttttgtgttgttctacacagaaataatgactgcccccaagccaaagctcttttcctcggtgtgtgtattcacttctctcctcctccgcatccctggcttccttcccttctcctggcctctcctacttgaaatttgctaagagagatctgaggtgtcctcagcaccccctgttgtgttataaagatcacagagttaaaaaatgataaccgtgggtggtgatggatgtgttaatttaattgcattcgtcataacacagtgtacacatacttcagatcatttctctgtacatctccaatatattccatttttatttgtcatttgcacctcagtaaagctgggggaaatgtgagctgcggaatatcgttgattggcttccacgtctggctccacctgtctcactgaacaactgtcgaaaccttcccagctttgctgaacctcacttttcccctccaggaagtggaacaataatagcacttatgggccaggcgctgtggctcatacctgtaatcccagcactttaggaggcccaggtgggcagatcacttgaggccaagagttcaagaacagcctggccaacatggcaaaagcctgtctctactaaaaatacaaaaaatagcttggcatggtggtgtgcgtctgcgatcccagctacttgggaggctgaggcaggagaattgcttgaacccaggaattggaggttgcagtgagctgtgattgtgccactgcactccagcctgggcaacagagcgagactctgtttcagaaagaaaagaaataataatagcacttcagtcatggcataattgatgtggaatgatcaattcaatgctcagtgaataactgagcaatgcaattcataatgcaatgaataactggtatgatgatgatgacagtgacaaaaatgataacacagataatttccttagactcctcatcccctggatggttttctgcagggctgatgtttatcaccttcttcaaggtttcatactttgcagaatcttgaacaagcctgtgcagattatacctttctttgccatgaacaagtctatgatcatgagaaagttattaacctctctgagcctcagttttctcatctgtaaaatgggaatggtaatagttcctacctcctagtgttactgtgaagaataagttaacatgtgtctaacatttagaagaatgtctggcccttaaatatatatgcatgttgtgtgtttttagattttcctgccaatgagagacagaaaatactctcttactttcctctctagaataggccaggcatcctctgctgcctcccatggctgggaggacccttgctgtctctcaccggccaaggaaggttagatgtgggtgtccccaggggcccaggggtgacgatgtgggtatagtgacaacagttagagttgctttcacatgtggcgtgattcctatgtgcctgatggtattaccagttgttacctacattaaccttatcataatggaatgaggaagccagaggaaccaaggctttgattcttttatttatccattttcataataatgagttggttcctttccctcctccagagaggaccaatgagtctttaaaaaaaaaaaaaaaaaatagggctgggcacggtggctcatgcctgtaatcccagccctttgggaggtcaaggtaggtgaatcacttgaggtcaggagttcgagacccacctggccaacatggcgagaccctatctctactaaaaatacaaaaattagttgggtatggtggcacatgcttgtaatctcagctactgaggaggctgaggcaggagaatcgctggcacccaggagacggaggttgcagtgagctgagatcatgctactgtactccagcctgggtgacacagtgagactccgtctcaaaaaaaaaaaattacaaatttatgtatttaagcctatttgatgttttccagttcatcacagtaatttttctttgtgatattcaagttgtcctatcttcagcccatggacggtgtttagtttgattcctgagtcctcaagagtagtttttgccattacactggacatcaaagcaaggaagctgaggtgttctaggcccttcttgtacttcatgccccagacctggaaacacctgttcctccagggggccctggctctttgactgggaaaaggtatttatacagcataatctaggtagtggggagtgctcgttgctactgggttggctattgtttctaggccttttcagtgttcagagctagaaaatctttccctttcttcttccccacctgcctcttccctccctttcccccaccccatcccttcttttttagtagactatatattatgatccatagatacttctaattcaaatttcgaatttttttttttttttttttacttaactaccttgatttaatatttgtatcttttttcttacactagaaatctcttaatggcataaataaaatttctttttttctttctttgagatcgagtcttgctctgtcacgcaggctggagtgcagtcgcgcaatcttggctcactgcaacctccacctccctggttcaagcgattctcctgcctcagcctcctgagtagctgggaccacaggtgcctgccaccacgcctggctaattttttgtatttttagtagagacagggctgcgccatgttggccaggctcgtcttgaactcctgacttcaggtgatctgcctgcctcggcctcccaaagtgctgaggttacacgtgtgagcccctgcagctggccgggataaatacaatttcttatgaggttttgctaatctggtagccaagtaacgtaatctccatgtagttttaatttgcatttctctaatatgaatgaaaagaacccttttttgcctcctgtcttccaccactttctccaaccaaggcagagttgatcacattttccttcctgtccccataatgccttggagacagcgctctgatagcatcgatcatcagtgatcagcttggtggtttctccaagctgtatattttactctgtatattttactgtctttttatcttccattgtttggcattgtgttttgccttagtgtttatgaacgacttaatagttctgacagtttttacttagatctgttaacctcagtccctttttaattcctatgtaactgcttttccccagcagagcagctaaaaaaagaatgatgagagagaatagcaacacaagaaaaacaagctgttgagaaaaaccagatgcatacttgtaaccctgacttctctttgagttccaggcacacgttgctccagcggccgtcgtgacatctccgtggattgtctaaagtagggtttctcaaactcagccttgatgacattttggactgcgtagctgtttgctgtgggaggctgttccgcatgttgcagggtgtttagtgacattgccccactagccttacctactagatgctggtgacatctccctatcccagttgtgatcaccaaaaatgtctctcgacattccgtactctgcccttggaagcaaaaataccctcctttgaggaccactggtttaaaggcatctcacactgaataaggccagtgcagaactctgttcttcctcctgacttgtgcgtctgcggttttctccatcttcctaaatggcaccactttccattcagctagctaatcaagttaaacagcctgagtcatccttgatttctctctttccctcactgtctacatctagtcactcaatgagttacagtcccttctaaaatatctcataaagccaaccattgttttctatctgtgttgctaccacaaatctaacttgccattttctcttgccgggagtactaccagtagactccttcctgtactctgcaagctgattccaaatccgcccacgctctggcgtgtgcccacatctcctgccttacctgtcaccacactcctcgttctactctccagccccctcagcctgcccctaggaagggccagggttactccaccctccagggtcttgtgtttcctatactccctctcccccaaatctccacatggctggcttcgtgtcctcccagtctccattcagtgtcaccgcctcagtgaggccttccctggcagtccagtctgatccaatggtgccttctgtctgactaatccattgtattgcccagttttattttcctgattgaaatatcaggatccccagtcttctcgattacgtcgttgttggctctttatggtccatctcccctctagaatgtaacttccaggaaggcagggatcaagcttaccttgcttccctttgaatcctggctcggaggatggactctgcatgagataggcactaaaagactgtgacattaacattctggtgtttctctgagaggactctagtcgcggtttgccttgccctatggacagagaaagaaagattttaatccttctcagagtcgaagctcttttacaggcatcatcccgaatacacttgatagtcacactatcactttcctccttacctaacattgcggctgctggtcctcatcccttgtaccatgtttaaagaatattgatcctgaaggtaaatttcagttatatacaaaagaaagataattacttagaatctggttctgtctcaattcacaatgaaggaaatgaaccagtgcctacggtcctttctttatcagaatctagaatgtgtgtgtgacccagtgatctaagacagagatgggaaaacctcttttgtaaagggccagagggtggatgtgttggtgggatggacgtcgtaactattcacctccgtcaaagcggcatggaaacagatgaatataagcaaatggctgtggccacgttccgtcaaactttatgaaactgatttccaaaaagtaaaagtcagtttctacagttacagcaggcacacttctatgttttttgcactgacgctgtaattttctgtttatcattattgattgtgttatctactgtcttagtgtgttcaggctattttaacaaaataccataaactgagaaacttataaacaacaaaaatgtatttctcacagttctgaaggccaaggtcaaggcagatgtggggtctggtgagggcccactttgtggttcatagagggcatgttcttgccatgttctcacatcgtggaaggacagggggtctctggggccttttttataagggcataaatcccattcgtgagggctctgccctcatgacctaagcgcctcccaaaggccctgctcttctaatacattaccttgggggttagaatttcattgcgcttttgagggaacacaaacattcagaccatagtttctcctgttctttcactttggaaacttcctgctaggtaataccttttataaaacgccatggagtgacttggggccacactgttagggtgaatgcattttaaaagacatctcatcagtgcacattttctaaaagcacttctagtttaagaggatcaatcttggctcttgaggagcttctgggctcgtgttagtgaggataagcccaagcttgtcaccgttcaaaagttttaaagataattttcaagaaatgatgtttataaacacctgcccaaaggtcatgtgatctggctatgtgagacccttttgttcttgaagtaagctagataaaaggcagaaacaaatgcagcccaaaccattttactgctcagagaatcttcttttgcaatttaccgtgaagctgtctgtctgttgcaggctgtagactggcagtcgatagaggtatggagttggtccacatagttgcttttgttttttttaaaaaataattagtttgaccaatattaaaacatagatgaattttagccccaccctagtgaaacacttgcccacgaacaccaggagaaacacagccatgttcacagcatcgctcacgatggcaaaacattccacacaacttagatatccatcgataagagagtcgatttttaaaaagtgtgttacagcatagaaatcaacacagcaaggaaaatggatgaacctcagctgtgcacatcagtttggatggatctaatgaaaattgtgtggctcgaagaaagcgagttacagccaaacacattcgtaagaatatgagaaaagtgtagaatggaacaggaggtaggttaagaattcacacttgtgggaagctatacggaaaggcaagggcatggtaaccataaaaattagggttgtgatcatgggagagggccagcattggagagaggttctcaaaagttccagaggttctgtaccttaaggtggtacacaggtatatgtcttgttatggttcctcatttcctatatgtagatatgcattagttattctcttgcatgcttgaagtgttttgtaatttaaaaaattagatgttctggaagcattgggctgatgatttccacatagcagcggttcactgggcggagtcacagctgagtccttgagaatgacgtgcaccttctggtttatcacagtacttagctgtactctccctcctattcccccagctgagcctgtcttgcccattttcagtggcgtttgaggtttggatgtctggccctgggatgttaggggatacagcctgttgaaaatggtcatagtgttttctgttaacacattggtaaggcagttgttgcctatgcatatcgtgtgtaataagaatgatttctacctgagagaaatttttcccaggcctaagtagcaggaatgagtcccttgaccaagtggtcagatcttttggaggctgtgaatcctatcactgttttttgttttttttttttgccttgacttctaagaagcttgacagaaatgtgagctcatctttagcaaaagtggagaccttgtggcatgtggtttttggttcggaacttactgttggcttttttgttgttgttgcactcccaggctggagcgcaatggcgagatcttggctcactgcagcctctgcctcccaggttcaagcgattctcctgccttagcctcctgagtagttgggactacaggtgcacgccaccatgtctgctgttcagatttaaaacagacatttaattcattttgcagtttgttgaaatagaatctttggctggagaattagcatattacagaggctttgaaatctttgtccttttctggccagggctgagcatgtaaatgtctttgaatagagatggggtttcaccatgttggccaggctggtcttgaacgcctgacctcaagtgatccacctgccttggcctcccaaagtgttgggattacaggtgtgagccaccacacctggccagcttcacttattttcttgcttctcctcctattttatttcctcacttaagaatattactccataattcacttgtttatataagtggccatatttttttaaaaagagaggatatgaactataaactctcatttacctagcatgatggcagaatatgattttacgagaacattctggaaagctgagctttattcagaatgttttattcacaaagctgccttgatcatctatttcagctgtgcatgttactaattttccaagaatgagaatataattaaaatacacttaatgctaaaatgcaactgaacataatttgatcttcgataatttagaaggcagttaaagagcgtgctgtgcctcaaggctgtaattaggaacatcaattatcatagtgtgacactataaaaatctggttatttcggctttctaatgatttgaaatctgtgggaactagaatttcgagtctgtgcatgcagtctgtgtatatataggtcttttgagcccctcatatgagcagttcatacatgttttcatagctgatgagtgtgagaaaggagaggccacctgacaagtcttggcagaggtgtgacgaggttagactcaggtgttgcgaagatcccccccggccacggagtggtatcaggactggagcagggcaaggctaaggcagtaatccctgcccaaggtgacagggaccaaagggcacagcgccgagggcgtcaagccctaggcattttagctgccagtgactgtgacactggcaggtcccttcacttctctgggcacacttgaccatcttcagaaggagcaggagtgtggagccataggccagaggaaaaatcagtggtcctgagcctgtcctcatgcctgatttaaaattttgctattttgttctccatagatttatttttttggcattaattttgatatttcaaaacattgcatggaaatattatttatcatgattactgagctttttgccacctccttaaattttgcacctagatgcctgggcgttgtgtatccagactccgaaaacttctgaatggtgccattcctaattacaatttttaattataattctctgggctttgaatacagaaagactgtgtttccacttagaatttggtcaaagcccttgtccttttctgtacatcagggtggagtaccgacgagctgtaacctgttcggatttaaaaggctctgtaatatgccaattctccagccaaagattctatttcaacaaactgcaaaatgaattgaatgtctgtttaattcattttaaatagtcctcgttttatactggaggacacggttctctctgtggccttaacaacctgactcaccatctgtctcacaccctccctcagccaggcacctgcatgtaaaaccattcatcctcatgatcatatgaggggccctctcctctgaacctccatttccctcttcttaaacagtttgtgaacagactattttattttagcaatggatttcagaatagtgctctgtcaactggaatggctttgatatagaaagagttgcatcgaaattctgtgtactcttaaccactgtgggtctacattttctcctcactcacacggcatggtgatgccaactgcatatggtcatgaggatgaatggttttacatgcaggtgcctggccgagggagggtatgggatagacggtgagtcaggttgttaaggccacagagagaacaatgtcctccagtataaaacgaggtctgtttaaaatgaattaaacagacatttaattcattttgtagtttgttgaaatagaatctttggctggagaattagcgtattacagagcctttgaaatctttgtcctttcctggccagggctgagcgtgtaaatgcctttgaatacgtgtttcgctgtctttgtaactacattccctccagcggaaattgaaggcaactttcaagtttaatgatgattacactgagttaggcccctgctgatggcagcactcctgctgcagcggcatggtctttggggataatattcaatattgcttccccagcactttagaaattcttcagaaaagttactagggatccgatagcaaaggacaaccttgtcagccgagctgtcctgtgtaactccctggtggccagcccctagtttgggcagaagctttgtcttttggggaggtgggtagagtgactgttcttcaagggtttgccataagagagggcttcggtgatcgcaggaacacaagcttcagggctgcctgcacccccttgtgcagggaaagggtgtgagggaagtagagtcatcctttggagggacccggagtagatgcttagtatgggccttacaagggaggggagttccctgaattgggcccctctcctctgaacctctgtttccttcttcttaaacagtttgtgaacaggctattttattttagcaatggatttcagaatagtgctctgtcaactggaatggctttgatatagaaagagttgagttgaaattctgtgtactcttaaccactcttggtctacattttttcctcgctcacatggcatggtgatgccatctgcatatgatcacgaggatgaatggttttacatgcaggtgcctggccgagggaggttgtgggatagatggtgagtgcggttgttaaggccacagagagaactgtatcctccagtataaaatgagaaatgcaattcctgtcattaaatgaggtgatgtcactaacatcatgaggacagtgccaggcgtgtggaattctcacatttgtgaatgttgaatggggtatggatgctttcatgcagggctggtctgggtacaattttgtccccactttattctgtgtctggacagagttgggaagcttaataggtgtcaaacatttgcctgcttaatgcctaggccaagaagaggggagaagttgtcagcagtagaatgtagaggctacacagggtcatgaatggtcttggatttgccgaagcctggaatggcgtggagaatctgtcttgagggcctgcctgtctgcacagtggtcaaggcctagatgcctttgctaggctcggccttggctggtaggcaccaatgtagccatcaatggcaaaacacacctccatcggtcagcaaagtcctgctaccctgagatcctctcatggtgacgttcacttccccaatgaccctgaccttctgaactcctggcccaccaagagatgggagagaagaggtgggcttcctctgcaatcagggtctgtttcagttgtcttcaggacaaacaacgtttggtgtagacagagtgctgtgttagccactgaacccatccctcattctgccttcatggtgctcatatgggagagatgcacagacagggtctacctcagctctggcctcccagtgtaacagtagcctacagcctgcgagggctcactgctgaaggtgatgcatggtctctgctctgagggtttttccccaaccaacagcagagatggcacctcgctggtggtgctgacacccggcaggcaggcacatttatgcctactgctcatctgtccccaccaggtggcattccacagaatcacctgctcatggtggcttctgggtcccacagcctctactgtgtatcattctgattgtccagtaatgtgaacgtttccctcatggggtgtggggtatttacggatttcatccaggctttgggtggcatgttatcccttctgcagggatcaacctcttagtagcggccacatcctggattgttgctgtagcctggcacttctggggccctctgcagatactgtcattaatcctcaggtcactcatgccaggtgggtgccatcgtcatccctccttcatgtttgtcaacttgttgtgcactcctccggagtgccttccgtgtgctagtcacggcttcgagtgccagggataaacaggaaacaagacagaaaaaatcctcgacttctaaggtataaggcagactcttgcaatgcctgtgtaatattttctactgctatttacacataaatggtatttctagatgggtacaaattaaacacgagtccatcagtttctcagctggagagtcttgacaacatgtaaggatttatttatctaatgagcaaaagaaacaagaacgcctgcctgcaagtcccggtggctgcaagtgtgattatgtaagctgtccgttatatcgaaaagtgctagaagactcttaagcctgttgcatgtaggaaggagagaatgagtcggggaaatgcaggtcacaaccagctggggctaatgggacaaacataaatggttatggcagagactgttacaaaggaaacctcactttgagagaggcaatggaaaggttgtctctctttgggccattagcattgacagaacctgctctcagattacccaccaagtgtgtttcggagttatttgggggttctgcaaccctgctgtgatttctatatacagcaagagatgggagagaagaggtgggcttcctctgcaatcagggtctgtttgagttgggttcaggacaaacagcctttggtgtggacagaacgctgtgttagcccatccctcattttgcctttttggtgctcaagttggggagatgcacagataggggctacctatctagcctcccaatgcaacagtagcctaaaacctgcgagggctcactgctgaaggcagtgcatggtctctgctcagttatttatccctctggaagcccttcttccctgatccccccacaagtaacctgtcccctcccatctgttgctctcttggcccctctgtctcatttttcttggtagcacccagcagagacatttatttgtgtcctgtctggcttctccattagcttgtccactctttgagggcagagactgacttgttcaccatggtgtcccagagcccaatgtggcacctgtcgtcacatagtaggtcttttctgagcatgtggtgaaggaatgggtgcccacagtgattctcagagggaggtgggttctcactcgttacttgaagtgaatgtgttcaacactcttaaatcgctcccgccagttagtatctggctgcaggtattgagtggtttggaggaattggaagggtttcctttagaaagggcagtggagttgaaggcacctgcgtaggtgtcatgcagtgcctttgaccatcccctacccttggtctgaagtctgtgtgtatcccctcaactctgcagctgaagttccagcttggtgcgagtttgtattttgtcttgatacttcttgagctaaatatgcagcagagttcaatcagaagcaggatcaccaagataaacacagacgtgtgcacgcacgcttgcacacatggatgtgtgcacacatatgtacacacacgcatgcacgcacatacatacacatgtgcacacatgcacacacatgcacacatacacgtgcacgcacacatgcatgcacatacacactgcatagttgacatacggtgtttaccgctgcaccagctaaagttctctcatgtcagagatcatacatgcattgcattaggagagactcaccgaaatgctacttgaccctgaaaaaaggatgtaacaatgagataatactccagcttcaaaggcaaggttctcattcccctcctaggtttttatcctagagaaaaggaaatacacgttcacacaaggacttgtgcacaaatgttcagagcaactttgtgttagccaactagaaaaggccaaatggccattggcagtgaaaagatacacaagttgtgtcaaggaggaatgaaccattggcacgcgtaacagcatggatgaatctcaaaataactgtgtgccaagtgaaaaaaaaaaaagaccataaggagcatatgctgtatgattccatttatagaaaactctggaaaatgcaaactaatctatagggacagaaagcagatcactggcgtctggcgacgggatgggagggtggcattaccaggagtctgaaggaacctttgggggtggtggacatgttctgtgtcttgtgatgggggtttcacaaacgtaaacatatgtcaaaacttgtcagaaggtattctttaaatatgtgcactctgctgtctgctggttaaacctcagtgaagcttaaaaaaaaaataaaggcaaggtgggaactgcccagggcatcctggcacataggagcagtgccctgctgcaggaaaaaacgtctcaaaatccatcaattcagggcaaaataacgaagaagtagcacatcccccacaggggaggtttgttctttcctaaataacagctgtgggagaagggaaggaggtaagtgatgagatggggctttcctgggaggaccataacttagttataaattataataaaaagacagtgaataaggtttcttgtaaaaagaaagttataagtgagggctggtccttcctaatcaactcgatagggcagagctgcattgctaaaaaattaagctcttcatttgaaaccctgttgggaacttcagggagtttttttctgaaccccccgccccctaccctaggtaaagaaacttctttctaacctttcagtgcctctctcccagagcttgctggattgagtagagatctttcctaccaggttccattacaaaggggacaggaattgaagcccttgctccaaacacagcctctcaccccatgacattatttgcacccctgtccaggtgttagtttctctgggcagcccatagggacctcccaggcagggctcacaccctcctccgtcctcctttcctggctcctggcttcctctgctggctggactgcaccatgctggccgcctcccatttcctccaggagatgcagggcggttgagcttgcagctccctctgcctgaaatgctcttcccaaggccgatggcccgtccgcctttaggtctgagccctcccttccttgagatggcgtggctggccatgcctagattcatctccaacccttcacccggcttatttccttcggaaaaacacagtctgttacttgtttctttgtatgttgtctgtcgccaattccagtgtgagctgctggaggcagagagcttggccatctctgtacatctctgctgtatctatggcacctggagcaggatggcagcctaaaactggggcttgttttagtgagagtgttggtttaacttaacatagcttatcattgggttaaataagatagagttatctctatctttgcataaaagtatgaagtggtaggtgtggggtgggtaggcagctcttttccatgaggaaccggggcccaggtttcttctgctttgttactccactggcctgtgggaagggtgtgtgatccagaagttgctcacatcactaatttccacatcctgctgggcagagtttagctactcaggtggctgctctgagctgcaagggaagctgggaaatgtagtctttatcttgcagccttgtgtccagctacaacttggtgggttttttaactcaaaggcaaaaaggatattgggggctatttagcagctgcagtgcttgatctgtatttgatgaatgaatgaatgtccccatcccagccccctgcacttccatctagcacagcacttgctgcgctgtcgtttagtcagggcttgctcctctctgaatttccagcgctcagccagagcctgggtataatagacacttagcagaggttgagttgaaaaactggcaactgcactgtagagactttaccttaactctgggccattggtgagagtgagggtctgtttttgagaaaaccctgttcgtctgcaggaagagctttccttgtaaatgtagatgaaaatgaagtgtcccattgaggcaggttttacccggaaataagctccacgagccagaagcagaggtgaggcgtgagggcaggggaggccagggggtctcgcatttcttgggagcttaagatctcgtacttcatctccccctcctcaagaaccttctttgctgagtgtcagatgtttctgcttggctttgggacagagggggagagcttccaagtggtcctattgcttaaacaatttataggccaaataacttccatggtaagggagaaactgatattcgtgatgtattatttactgttaggcaatggagatagaggatgttttactgagttcacactcagacattcctgtgaccattctaaaacaaccagttctacctcatcctgagactgctttaaaagccctttcacagaaggctgtgtggcttgccagaggtgggatggccttccgagtcagggggatctggcttttcaggtctagcattgtcataaaggagcttcggaccctggggagactttttgttttctgttttttttttttagacggagtatcactctgtcacccagggtggagtgagtggggcgatctcggcttactacaacctccgcctcctggggtcaagtgattctcctgcctcagcctcctgagtagctgggactataggcgcccaccaccatgcccggctaatttttgtatttttagtagagacggggtttcaccatgttggccaggctggtcttgaactcccaaccttagatgatccacctgcctcggcctcccgaagtgctgggattacaggcgtgagccactgcgcctggcctgggtttttttaaacctctgagaagcttggttgatgtgtctgtgaagtaaggataattatgcctacaccctgagttgtagaaggggtaaaatggggttgcctaactacaggatcaccccagggcctttatacctgcccttctctcttccgggaaagtccctgccaccatggcttgataagttcctgccagatgagaagtgcccttccatgacctgccagtatgaactggggcagcctccgtcagccctcttgtggaattccatctatcccttgcagcatcgtcccagctctgaattcggtggttcttcttgtgagcgtttgtttcatgtgtgttatagcagctgactcagggccccatgagggcagggaagtctcagttctgctcattgttgcatcccccacacctcaccccatgccgggtatggagtcttaattgccccattggtatcagttgagtcagtgattctgtatgtgacagatgatcagtaaattagagccaatccagttgaatcctatgacaatggcttcctataacatagagggtatttatgatccttgctttacagcaaatgagactgaggctcaaaaacaaccatctggctgttaagtggagggcctaggactcaagtccagttctttggtttctaagctaatcattcttttgcttatgtttatttttaattatttatagagtcaaggtctcactctcttgctcagcctggagcatagtcgtgcactcacagctcactgcagcctccaactgttgggctcaggtgatcctcccacctcagcctcctgagtagctgggaggtcacaggtgcatgccaccagcaggcctggctatttttttattttttttaacctttgtacagctggggtctttctgtgttgcccaggctggtcccaaactcctggtctcaaacgattctcctgccttggcctcccaaagtactggcattacaggcatgagccactgtacccagcttgttaattgtagaagtacctgttggatgaatggtctgcagatgtaacatatgcacatagtttatacctgaaagagaagcagcacagagtggtggttgcgagtggactctggagccagacagctcaggctggactcttggctccgtgacttcctagccgtgtggcctcagccgagttccctagcctttctctgtctcattttactcatctgtaacatgaaggtcttaatagtggtttgttgtgaggactaaatgagttagtgtttatgaataggctggaatggatcctgatatgcaagatataccacttaagtctttattttaaaaacttaaagctgtttcttcagcatcttctttcctgtgagcttttgcaactgaggttctttgattctacagcttggtggattttataacactaaatcaaaaagaatgttgggggatagtcagcagttgcagtgttcacttgaattggttctgattgaaactgtggttgagcagaaagaagcagcaggaagaataaaagccatcatgtccttgcccttgatagattttggtggctaaaacatgacacacacgatgttattctgtctcctaccgggaggcctgtggcaccaaattctcgtcttctcaataatccttgagtggtttctgaattattaatggatgtggtattagcaaaccacaagttccacaaaattgctctagggctggcatttgacaggcaattctgttccctaattttctgcacatatcttaattatgacttcatgggcttgtaccttttaatctctggtttcatcctctggaatcgtgggaggcctcactgtctccttttgtctcaggggaatgatagaacccctggtgactgtgaagcagaagaagagtggccaggtgcattggaccgggcttcagtggggcctcccagttgagagtgatgcagaaaattattgttgttgtgatatgtcaaacagtaggggccttgctccggaccagggatgagtatttttcttccataaagggtggccagagagtaaattctttacaccttgtggatctaacgcctctgcttccagccctcaacttggctgtcattccaggaaagcagccagagatgctatgtaaacagaacacagcaatgctcatttgttatgtggatggaattgtgttgcccccatcatttacatattgaatccctaacccccagtgtgaatgtatatggagatagggccattaaggaggtaattaagataaaacgtcattagggtggggcctgtgtgcgtgcagagatgagacagtgtaaagacaccacaaaaaagatggtcatctgcaagccgtggagtggcctcaggagaaaccaaccctgctggcaccttgatcttggactttgcccctctacaactgtgggaagtagatttctgttgtttgaacaaccgtctgtggtattttgttaccacagccctaacagactaatacagttccaataaaacttatttacaaaaatggatgatgggctggatttgactcatggtagagagtttgtcacccctgctctataggactgtcaatattgttattaaatcaggaggcatctcttctgggtcaggggctggagatgtaatggggtgaactgcatcaggcctctgctcccatggaagatcctttctagtgagtgagatagacactcaacagatacacaactgcgtagccaggctgttctcagatacagctgagtgctccgaagaaggcacggggtgatgtgattgggtgaatgctggctggggaagggagatgttgcttgaagtacaaagatctaggaggggagcatcccaggcagagagacagcaaaggtgaaggccagaagcaggagagcttggcagattggagggactggctgtagccagtggggcgggaagaatttgggataggttccacagggacagggctgacttgtctaaactagcatcagattcaaaaggcctcttctgggaggccagggtgggtggatcacaaggccgaggtgggtggatcacgaggtcaagagattgagatcatcctggccaacatggggaaaccccgtctctattaaaaatacaaaaattagctgggcgtggtggcaggcacctgtaatccctgctactctggaggctgaggcaagagaattgcttgaatccaggaggcggaggttgcagtgagccgagattgtgccactgcactccaacctgggagacagagcgaaactccatttcaaaaaacaacaaaaaaagtcctcttcttacccaaatcgggatcttgctctctctcacctcaggggcctccctcccactccttctgtgccccccaaggtctttgttatgctccccctgccccgttccacatcttaaggtcccgctcactgggcttggttagggcaggcacacttccttctctcccatccctccttcctgcccctggcttctctgcatcctcttccctcctggctctttctgcagccctcccagggatggaaccatgagctccaggttgctgcacagtgatccttgaaggtggtggaaagtgaaatcttctgaggcctttgggaaggtatggaggggattgagtagagagacaggttttcagtctcattctggttattggattcaaaattgatcatacagtggtggctagggcaggagcccatcacagagggctagaaacctcacattcagtgattcctttattaaatggaatgtaacttgaattgttcttttccagtttgcctcctacctgcccaggtgagaggaaattcggttacagtgtttctcccagaagttttctctttccactttcctattgtacaggcacccaggaccttggagaagggagtggcggactgtctttaggttaacaatccatggggcagctgctccagtgcccatgcatgggcctgtgaaggcttggctgctggctgtcactccctccagagacacacttgggtgcagggaccttcgcaggccccagatgcgcaggactcagtctgaacaggtggctcccctcgtcttccccctggcttctgtgtgtccttctctgtcttggctcttccgtgaagccctcacaaataagctgtccttacaatggggcttaatgactcattgagagatgctgggagtttgggcagctgggccccacatcctagggtgacttgagaacctggtggcccttcctgtgcctttagagccacagtggcctcaaggatgggaacgtgctgcttgtaaagccataaagaacaaataacatggcttagatttctgtgtgctgccacctaacactctcacttcctcaccctgtgagcaattcattgtgcatttaattaacacctgacatcagcttcacagggactaagtgtgtcttatgcaccgtcttgtgcctagtggccagcagacacaagctgtgaaatgagtgtaaaatgaattaaatgaacattgttaactgggtgaccctggatatgttccctaacctctccaagcctcagtctcttcatctgcaaaatggtgatgctaatgactccccgtgccggggtggggggtcgaaatgagataatgcaagtaaagcattcagcccaggacccgactgagagctgaaaggtatcagcacctgccatttctaccggcctgggggaaacacgcttagtttggatgggagtggtaataacagccttggctgaggcggtggttgtcatcacgccaccgatggaggactgaccttgtgttcggccccacgctggctcttggtgttcttcgctgtcagcggtgctgtgactgagacatccttggcccatttcacatgtgagcccccacggctgcaagagagtgagcttcttccagagagggcggcagagccaggattgaaattcacatcttgctccgagctcatgcacacctgggagcctgcatgttcttgctagattttacagccagcaggcctttgttgaaccgtaagcagcagcggccttgatcaggctggtttttctgcccagaggcccctttggcatcgtgactcaaaattttctctgggtattttgccttcttgctgatgcatcgtttgccggatgggaaccagcaggtagagagtgttggctttctgcctccggtcagagtcgggaacgtgacttggatacaaactcagcatggagggaggcatgacttgggagggcagaacccggcagcttcattcccatcctctgttggtggggaagagtgagcaactcacaggtagaaccaggacagtagtcagggctgtttaaaaatttagggctcctggctggacgcggtggcttatgcctgtaatcctgttcctggaccaaaccgagggttgcgctgcttgttcttatggcccaataacaagatgcagatgaactgggaagagaagaattttttttttttctgtaacgaggtacagggagaaggcttagaaattatctgcagaccaactcaaaattacaaagtttcccggagcttacataccttctaagctacgtgtccacgtgtaagtgtgcattcctctagagacctaagtgatcagcttcttctagtctatgactaaggtctgagtcctgaagaccttcctctagagcttcagtaaatttacttaatctaaatgggtccaggtgtgggcgtgattacccttatcttgtctcctgctaaatcatggaggtttggggagtcccttcagacccccagtaaacttgtttgtggaggcctggggagtttcttcacatccccagtaaaacttgtttaatccttcgttatcttgtcatgcttcaaggcccaggaaaggcctgggcacaactaggggtgggcttttgttacattccagcccttgtataagggcagtagctctctcagcttttaatatttaacttaaccactcagtcagtgctgacacaattgttatagaggcctgtgttagtgagaactggcctgccacaatcccagcactgtgggaggatcatttgcggccaggagttcgagaccagcccaagcaacatagaccgtctctacaaaagtaaaaagttagttgggcatgatggtgcatacctgtagttccagctactggggaggctgaggtgagaggattgcatgagtccaggatactgaggctataatgagctatgatcaccccagcctgggtgacagagcgagaccctgtcttaagaaaaaattaggactcctatcccacctcttcagagacactcatataaaaatacagtgtttccagctgccatttgttgagtacctgttggcggtgagccagactgttgatctgtgatgttgtgttaaatcatcctggcaaggagtgaggtagtgatgaggagggctggtttcacagaccaggaaactgacccgccaggaggagagaagattgtctcggccatagctctctgtagtgtgctctgggctctgtgtgcccagagcagctcagcccagatccacaccacagccccaggtggtcagtatcactgcagctttgttaactatggagacttcaaagcaggaagggggagggatgcacaccctttctcttggaaatttcctggaaggcaagaactgctcgggctcagccataattagttccttggtggcaggtttcttcagcctcccacatgggaagaaacccgagtaggttgtggaaatgcgggttccaggaagccttgcctgacagctcctggctggacgtggctgcatctcgtcactggtctccctgctcctggggagctgccacctctctgcagtcaccttccagtggggcagacacagatgggtcctaaggagagagatgaacaaagtaatcactactgtgctaagacatagtacgcttgagagacagagtaaagggccgaccctgacttcccagggggaggtctccctctgtgcaggtgtccttccaggatgagaaggggccaggcagctggagacttgggcaggagcatagcaggcagagagggcacagcctgtgcaccagccctgccattggaaggggcttggaaggaactgcaggagagtcaccgagagccagaaccatgcctgtcttcctgccgcaatgcctgtgcccagcatgggggctggtgcgtagcaggtatttatttttgtcctgaatgaatgtgaagacaggaagcgctcagccaccatcatcagccccaagctgtgggaagcagaggtcagaggctgggaaccgtgacacgttactggtgcttttttggtgacctcactggagaatacttaagattaaccatgtgtgtgtttgtgtatggatgtgagtgatccctcactcatcccttctagaatgttctgaattgcccactgtgttccaggcagtgtgtcatgtgctggggaaactaagatcactccagcatagaccaatttcagggaactcagtttagataaatgaggccgataagagaacaacatcaccatgcattgtgacaaaatgacactgactcttccttccaaactcaagagttgtgatctaatcagaatcgtgttccaattctttagatgaaaaggcaattgggagtttaagcaaatctgggacctgaggttgccttaggtcccacatttgggtgcttaaaaggatggcggcagtgtttaaatgttgataaacaagaacagaaaaaagcaacacgtttgtttttcgttatctgtccatagagcaaatcaggactgaggcgataaggcctgagcacaacctgttgaagaaaatcctcaccctcctcatctagcctcctccaggaggtccttaccaccatcccggttccctccgctgcctcctccaggtctcagcttccccatgacttccagagtgtcccttctgtcagctgccacactgctctgttcctaccacatcccagtctcaccccaccacagttaccactcctgctcagacctcatagtcccccttagttccccacgcagggaccaaagccaccttgtcttctccagcggccaccctccccctcagaacagggacactccattggagtaggttcactgtgtcctggaggaatgacttcccaaacccagtccgacctagctagagaaaaacatctcagcctttcagaatttagcccccacacttccacctctggaatcacagtgattcccaggccaggcctgggagtgaggacaggtgacctgtgtcaagggcatatgacgtcatctgtcatagctatttctttcttccgtggaacattgttgcagagcctttgagagagcggggggaggagtgctttgtttttggagctgtgcaggtggttgagagattaggggatgagctccagtgagcagatgagctcaaagagggcgctgagagctgggctgaaagcgcacgctggagtgagtgtgtaagtgggcctccaaccagcctgtggatacccaggtcttatgagggccccggggagaagaaacttgggcccaaacagatggcaggtgtaagagtcatagatctagttctcagaggacaaacacatgctaccacccactcaaagagcacaggtcctgatgggacttccttggtggggtggggaagacagagagccggggatatcacagctgtgccagggaggtggcccagcgtggatgagctttgggatttgtgttagttagggccccgattctggctgactcaaacatcaaagcacctgtcgtggttcacgtgatggtgaagtccaggtaaggggggattccagaggaggttcaggctgtcgtcggggtcccggtcctgtgtctgcgtgacacagtcctacctggttcccttcactggaggaaaaatggctccaacagtgccaggcttctccctacctgcaggttgagaacaaatgcttgtccctgcgtcctaagcaggggacctagggtagaacccataaggccagtcacgctagtgatgggagtggggagaactccctgagtggcctaacctacatcctgtgttccacgctggagctgggcgaggagtcagcttgcccagaactgcatagggtctctggtggaaatcaggggctatcgcaagagagggcagggaggggaccctggactccagcacctagtgttcatgacagttctcttgggattctgtcccatgtaaagtacagagtctagtcctggatttgagaaacttctctgatcacatatccaattgttaaaaagaattgtgggttactgcaatatacatttgtttgtttgtagtgtacatagattctttataatatacaaaacaaaaatcaggaacttattaaagatgatgaatagaaactaaggtggagttctaatactcctttgggtaacttggggatcatctcaagcatcctgtgctggagacctctattaggatgcagtcactggggactaccattaggacgcggtcgctggggaccaccgtcaggacttggtcactggagaccaccgtcaggatgcagtcactggagttactgggggaccaccgtcaggatgcagtcagtagggggccactgtcaggatatggtcactggaatcactgatgaccactgtcaggatgcggtcactaggggaccactgtcaggatgcggtcactggagtcactggggaccactgtcaggatgcggtcactggagtcaccggggaccactgtcaggatgcggtcactggagtcaccggggaccactgtcaggatgcggtcactggagtcaccggggaccactgtcaggatgcggtcactggagtcaccggggaccactgtcaggatgcggtcactggagtcactggggaccactgtcaggatgcggtcactggagtcactggggaccactgtcaggatgtggtcactggagtcactggagtcaccggggaccactgtcaggatgtggtcactggagtcaccggggaccactgtcaggatgtggtcactggagtcactggggaccactgtcaggatgtggtcactggagtcactagagtcatttctgtgctgtggcattttaatgtcgttactttgagtcattccttttctccagtcgtgagttgtgctgtctgcccaccactactgatttaatattttctttaaattttctctcactttttacctaaagtaaactcatttgtaaagaaaacgagcatcatttgccatcaatagaaaaataacttcaaaagtaccatgatgaatacaaaacagtaggttagtgtctagtcagccactgtagtctgcctagaggttttaaaaaaaaaaaaaaaatggtgaacaaaggttagcaggcaaaggcagatgagcctcgacttgaaagactgagaaggcatgagaaagggaaaagctttgtctggcatccagcattgttcactgtcgtatccaggcaccacagaaaaccatcttggtttccgagttccatgcttggggagacactggtggggtgattaagggtgtgggcactgaagccaggtggcctggagtttgagtgccatttttatcccttccctgtgcctcgtcttcttcatctgtgatgtggacctccctcccagagatgttgggactagatggagcagtattttcaaatgtcttcatgtatgacatgcagttgttaagtactaacttttattattactggtttaagttgttgtttaaactgttccagactttttaaggaatattttcaatttgaaaatatagagattgattgtaagtgttctgtgatcaaactgatcctagagaagaatatgacgtactccctcaatttatccatggggcctgagatccagccagtctgcagagacccagattggaccatcgcagtgtgctggggtttgtttcctcatgtgattataaactttcacatgagactgggacctgttctaggcatttttgggggtcattccatgggcttttgggggggtcccatgagtttacattgaggacagcatccttggagcctcagaaaactgagcagcccatcaccactggtctctcggtgctgcagaggcaacttggatgccagcaagttccaggccagtggtataatgaggcatgaagtcccaggaggactgggaggaagacaggagtgtccaaacaggatgacctttctcctctccagctgattctcgccctgtggaaatgctcttggcatttcagtgctggcatctgttttttgtttgtttgtttgtttgtggagatggagtcaggccatgttgcccaggctgttctcaaattcctgggctcaggcgatcctctgcctcagcctcccaaagtgttgagattctaggcctgagccactgtgcctgtcaatgttttcttttttaaaattgtactgggtgagcaaaacctgtttgcaacctctggtctaagcccatttgtgaattgatccccttcccctctcctgctacctgcgttgttgactttaaagctctattctcggcccccagcccatctcctagtccctttgatgataaacagtgccatgaacacagctcagagctgacaaacgggcctcctgacccagcaatccatctatctgggaggttgctgaaaaccgaaacctcccaggctacccaaacacccacttctaaagcccccaaactccactaggtaatgaaagatacccagggaaattagaacaatgacaataaaaacagcgtttcaaccgggacgcaagctcttgggtggctttactcaggagggttttttctcccactggccctttatataattctccacagtgatgggtatattacagcaatcttgtagaacgacagccttgtgaaagacagaaaacaatgtaactgcccccagtttttaactgactttcctttgcaaaattttgcccttcgctagcaatgtatcccatctctacttctgcaggcccctccctaatggcaagaaagaatagaaatctgaaatgtctgcattttgactatagcccttccagtgtgaccctctgaaaggcatttttaagaaagagcagaaatgttggaatgtcacagacatttatttgcatggtatcataacagattttaatttgacaaggaaaccgcctaagaggaaggattgaaaagccaatgccaggtagaagaggtttcctttgcgaaaattatttaaatgcattctggcagctcttatttgaaggttaattgtgattccgactgttagggaaaacctaattaacaataatgggaaaaaactacatttaagtaatattaaggttgtgacaagcattttataaaagcaagaactcattgctgaagtttagacttgctcttccaacctgtggcccattgttctcaggtagtgaagcagataaaatgcattaattaaatatttggaagcactttgctggttcttcttatttattatcttgtgtgaggttgacatcttggcaatttctgagaacaaaagaatatacagagaagtagatttgctccttattttatcagcgggattatatttaaatataatttttggccaggcacagggggttatgcctgtgatcccaatgttttgagggtccaaggcaggagaattgcttaaggccaggagttcaagaccagcctggacaacacaacaagatcctgtctctaaaaattttttaaagctattagttgggtgtgggggcatgtacccgtagtttcgactgttcagggagactgaggcaggaagattgcttgagcccaggaggtcgaggttgcagtgagctgtaatcacacactgcattccagcctgggcaccagagggagaccctgtctttttttcttgttttttgagatggagcctcactctggtgcccaggctggagtgcagtggtgcgatcttggctcactgcaacctctgcctcccgggttcaagcgattctcgtgcctgggactacatgcacgtgccaccacgtctggctaatttttgtatattttttagtagagatggggtttcgccatgttggccaggctggtcttgaactcctgacctctcaggtgatctgcccgccttggccccacaaagtgctggtattacaggtgtgagcccagccaaataaatatatagcttttttgtctttttttttttttttccctgtccaggtgtgaggggcagtcaggttgggaggggccctggaagggttgaaccaggtgggcatggcatggaggcatgagtactgggcaagttggcaaactttctgtaaagggctgtgtcggaaacatgtccggtgtgatggccatgtggtctctgtcacatctgctcagctctgccggtgtgtctcacaggcagtcataggtgatacataaatgaatgggtgggattgtgttccaagaaaactttatgtgcaaaaacgggcactggggctggctttggcccggggctgtaacttgctggcccctgtgtggagtctggaatctggtgacctaggtttggatttaagtcactcccaagtctccaatcctggacaagtttctctgtgctgttgttttcttggagtacagtggatattatactagccttgtggtactgtggtgcaggtggcactgaggctggggcagtgtggtagggcatgggccactgggccttgcgggaggtgtgaggtgggggcaaccccatttggttggaacgtggtgctttttattactgtgggccaaggtccgaggcatttgggaaagactggattaggaatgggggcagctgctgcagttggagagaaacactgaaggctttgggggcgtggctgatgatggggttgaccgatggggctgatgggctgctgggttgctctgtgagaatcggaggtgtcatcctataggaaccacatgacccctcttcgtgggtccctttatatcctgttggacaacctctgtcttccccctgtaagtcaataaaacagtccccctggcttaatttcatgttttttgtgtcagtcatgttactgtcttggtcagtatcagtgaaatcgcagcccccataaagcttcctttctagtgatggggtctttttaagcttctgagtgacatcagcctttgtagcaggatgggcgtcctgtagtttgaggagattggatggtgtattaattagctagagctgccctaacagagtaccatgggttgggtgtcatcacagaaatgtatcttctcaccttccggaggctggaaggctgagatcaaggtgtcggcagggttgttttctgaggcctctctccttggtttatagacggccgtcttccccctgtggtctttcttctctgcatgactctgtcttgtccttctaagaagaggagattaacagtcgtgttgggttagggcccaccttaatgacctcatttacccttagttacctccttaaagcctctgtctgcaggtatagtcacattctcaagtactgggggtttggatttgaacatgtgaattacggggtgacacagttcagcctataatagatggagttgcttggcacatggaaacagagccggagagagacagagaggaaaccagaagtcaggctgttgatgcttgcagggaggacaggcaggaagggtcctaaattgggtcccctgttgaggtcactcccatgaggtgaccatttgggattaggtctgagcatcattctactgagggccaggtggacagggcccttcctgccaccatcctgcttatggcaccgtcctgtggatttccgcataatctccgtgtggagttgaaccccacccggagaccatattcagacactgtcagctggtggcatgagcagtgtcacaaagtcagactgttgtgggtttctaaagccagcttaggcaggacaccactttccagagcctcgggttgcccattggtaaaatggagctgcacatacctctcccttgtagtcgtgggaagattgagaatctgcatatggcacgtttggcacagtgcctcccgcagagtagacctcaataaactctagttgttcttttatcctagctgttgcttttattattttactactactgtttgtattaccctcagccagcgatgtttctagcttgttgatatctcttggcctttcagctatagattatttattgtagcaactaacttgaaaagtgatgcatttgtggtttcatgtatcttagaagtaaagaaaattcttctacaagccaaacagaaagcccttggctgcctcacatccccagtgacaatatttttcacagtgttaacaactcttagaagcacaggctatgacctctgccccaaagcacttgactctcagccagggtgaggctgtgggcaggaggacttctggaacatgagtgatacctgtgtgcccagattcctcgttctctgtccccagaggccttggttctctgacttctcggtcagctccactgtcttaccacattcaaacctttcttggaaaagaatcgttcatcctttcacttggatgccctctaaatttgaacacatttctatcacagtctgctaagtcttattttcatctgtgtatctctccctgttttactcagacttttttttcattattgccacaaatgcttctttaaatgatttaggcaaagatggagttgattggctcatgtaacagacaattctgagaatgctggctgaaggtatggctggatgtgggagctgaagcgatgtgatgtcgggacactgtctccctggttccctgggctcagtttcctatcttggcttcatccttggtgggcttttcatctacagtgacaaaataaccccctggccaggcatgatggctcacacctgtaatcccaacactttgggaggctgaggcaggaggatggcttgaggtcaggagttcaagaccagcttaggcaacatcaggagacccagtctctacaaaaaatagaaaacaaaattgagctgggcatggtggtgcgtacctgtggtcccagctactcaggaggctgaggcaggaggatctcttgagcccaggagttcaaggctgcagtgagctatgattatgccactgcactccagcctgagcaacatggtgagaccttgtctcaaaaaaaaaaaaaaaaaaagtgaaaaaatacccccagtagctctaggcgtccatctcagcagcttagcaactgtaggcaaagacctgggatggatactgggttgctactagcagctgtgtccagttgaactctccacaggcaggtgctggcttactgggttttgtcatcccagccacttgcatggtgcctggcacataaaccgcaggactgaccagtgttgtctggtaaagataatttggttcctagctgggaactagccctcctcttaatggtttttatgattgtatttttcagtggcataaatgattggagagtgatttgtaccccacacagccctatgcaataaacaggagtgtgtattaccttcgtgtctatccatgccagctgctaagcatgtttttctgctatgcgttggctcacagttcactggcaacgagtcctctgcttcagatcactcaggtgggattgaggtgttggcacacatgccaagtggcccttctcttttcagcttctgttgaatgacttgacttgtatttttcagacctgttctttgaatagcacaaagatcactcttcctctttgacaagagctgtttttttctgaagggactaagacgcgttaacagttatttataccctgtcttgttccaaaaggcatttgagtggcatatcttacagataggtgcaggagcttgggctgttgcgtctgagacactatcctgatgggcacactcctcaacatctctgaacctcattttccctgtctgtgaaatggggataatgaagacccattgcagaatgttgttttgagaattaaataatttacagcttaagtattagtcacttttgttgttgttgcgggaggctcaggatcagtgatgtgaaacagttggcctggtgcctgggacagagatgtgctcaggaaatggtggtccccttgtggccttgagtaaacgacttaacctctctgtgcctgtttcctcacctggcgaccagcctgaccaacatggcgaaaccccatttccagtaaaaatagagaaattagccaagcatggtggcggacgcctctaatcccagctactcgggaggctgaggcaggagaatcacatgaacccaggaggcagaggttgcagtgagctgagatcacaccacagcactccagcctgaaatgggcttgacggtcataagtaatgatagttaacactcacgcaatgcatctgtgagccacgctttcactgcgaactgtttaatcctcccgacagctctggacgacaggtggtcaccattgtcacctttttacagaatatggaaactgagtcccagtgggttgaaatagtagcctgaggtgacatctttgcaggcagcggagccaggcggctggaccccagagccctggttcttaaccagcacgcgagtcctggcggcgcttgtggcaggtttcagggctgagggtggcatccttgctcccagaaaatcacttcagatatttttaggcctggattctatttggtcactcagcagcccagtgtaggtctggcggatggaggagtttgggtgcagcttcacgttcagatggaaaagctggtcttccctgcacttgcctgcaaaggctcctggggcagagccctgacacagaatgtggttggccactccaggcatgctagccccctggcttataggctgcagaaggcttccttgactgttgtccacacactgggagcaattcagtttctcatcttctttgggcctctgtagccaactacagttccttgcttcagagcctgtgtctgtgtttggaagggggctgtggattgcaccccatgggctcctaccttgaatcctctgctggtatgagcttggcaggcctgactggcccttctccagagagagctttggcctcagctgctgagcccaactttccaggctgctgggcttggctgcccggtttcactcctagaaactcctacacagagatcatgagatttacaggacagagccttctctacgtgctccaagtgggtcccttggtcatgcatttcttgggcctagcttggtaccagaaaaagacacagaagctgtctaaactttgatttaatttttattcatttttacctggtcttattccaaaaagcatttgaagcagcatagcttacgtataggtgctgagagcatgaggtgttgtatctgacacactgtgtcattgtgggcatgttccttaatgtctctgagcctcagtttccccacctgtgaaatgagaacacagaagacctgttccagaatttttttgtttttgagatgaagtctcactctgttgcccaggctggagtgcagtggcagcgatcttggctcactgcagcctctgcctcctgggttcatgcaaatctcctgcctcagtctctgaagtagctgggactacaggcgcccgcctccacacctggctaacttttgtatttttagtagagatgtcgtttcaccatgttggccaggctggtcttgaactcctgacctcaggtgatctgcctgcctcagcctcccaatgtgctgggattacaagtgtgagccaccatgcctggccagaatattgttttaagaattaaacaatttggccaagcacagtgaatgccccaggaaccttagcaggcaagtggtggcgcacgcctgtagtcccagctacttgggaggctgacacaggaggatcgcttgaacctagtaggtggagcctgcagtgagccaagatcatgccactgcactggagcctgggtgacagagcgaaactccatctcaaaaaaataataataataaagaaataatttacaatgtgagcattacttacttttgctgttactgatgctgttattaacattattactattatcctcatcctagaagaaaattgatggtcagggaaaatgaactttcacctgactcagagccaggtgtgcgtgcggtgtgtgcacttgcgtccttgtgtgtgtttgtgtgtgtgtgcacgggcatatgcatgcacaagtgcgtgtcttcagctcgttgccaaatggttgcatctggctttcccctgcatgaagctccgtcattttccatagtttctgagcaaattaactttggcatctagctgggttgctcatttgctagtcgtgcctgttaggaaaggcttgttaaagctgtgttattggtggcgttttaaaaatgtgttactctctttgtgcgccttttgcctgttaaagtgatgactctatcctcccccgtcctcgtcatattgaaggccatgatcacaaagcttgaggaagacccagtgctgcatggtggagtggttgtgagctcccccgaggtccatgggcaggtgcttctgacgctcaagaaccccgtccttaggcccaccttccaggtccacctgcatcccagcccctggccgccaccagggttgggcacctctgtctttctcttatcctcccagcctgatctctagcacttccccattcctgcccttggttcttctggcctctggtctcctcgtcagtcctcacggtcctgtctgctcctctttcatttcgtcttggctgctgttgcccgcctgcttcgtcactccatgtgccctcgtccttcaagcctcacctccaagctcactcctctcctgggcccgctttgagaccctcatggccacccctgctcgtgcggttagtgtgcatgtacagacgctctgcaggcaatatttcagaggggaggaaatggaagaagggaggaaagaatgaagggaatggagtatttagcatcctggatatttagcagtgtgcatttgttcattcacaaatgttttgcaggcaatcagttaattttttttttttttttttgaggcagagtcttgttctgttgtccaggctggagtgcagtggtgcgatcttggctcactgcaacttccgcctaccaagttcaagtgattgtcctgcctcagcctcccaagtaactgggactacaggtgcgtgccaccatgcccggctaatttttgtgtattttagtagagatgggatttcaccatattggtcaggctcgtcttgaactcctgacctcgcgatctgcctgcctcggcctcccaaagtgttgggattacagacgtgagccaccgcacctggccgcaatcagttaatttttacaactcttaggatgttggtagagttttccctgtttgagagagaagaaagctgaagctcagagattaagtaatttgatcaattacatctgatcaatgatcagtatgggtgtgctgaattcagtgtacctttgttcattcaacaacatttatcaagcacctgtgatgggcctggtgctgtctaggtgttgggcttgtagctgtgatgaagagggtgtgatttcctcttccccagggctcccagtccggactctctaatcttttcatggctcctgataagaatttcttcccaagcaggtgagaaggtcttattacttcagccattatctgtatctctcacagagcctatgtcctggggactgggcaggaaggagggtcctaccctgtaggatggctgaggtagaaaaggccatgtttagccaggtccattccagttattctcagagacccgaatggagaatgacaggtgtggctgccaggcagatgcatcccgcgtttccgtgccctgcatttatctttgccatctcactgaaatgaatgtaacctcatggggatgttccttgtcttcccctgtggctgatgggtgtgtttgttaaatatctgggatgtttaatttttagacggccttgtagggaagcgaaaacatggctcatccctttcagctagacgtagggaaacacttcaaagacactgtcacctctgaagccatccactttaggtctttgaggttttgagtaaagacaagtgcagcaaaatgacaaatgttggtttaaaaacctaagcagtctggagatctttgggatggcatgttttgaaacaaagcacaccgccaaggaactcgcttagcttggggcaactttcacagcaactgtttgttggtgggtcctttggtagagaaacatgagagactttgaggtctggggcttcgcttttgtgaagctctgtcttcctgtgtaggtgagtcccaccttggggaaaaaaatcatccccgggtgcattcgaatgttcttttgtgttcggcaccgtgcaaaccactttgcatgaatgatttcacttaatcttgatgcataaaacagggacacagggatgctattctgatgacaaagtatccttccccgcaaacattatgggacccctttaaatcaaagataagaatctggcatcctgggctgcatatagcccatagatctgtttgatttggctaattcggtttttaggattgaatttattgacaatgctgaacattcgggccatttcccataaagctcactatttccaatttcccttgagaaaatggaaagctcccacataggtgggtgtgttcacttggggctcagtagtggtggccctgttttcaagagggcagtcctcaccatgtcaccccatccccacctagcctgcttctctcaattattttacctgcctggtccctataggcatttgtgtcagccccttttgctttaagttatcagccccagagccttttttttttttttttttttttttaaaaagcaacagtctttcaaatttgatgtcatacacaaacctttgggcctgtcatcgactgagcattccgtcagcgaatatgcgtcagaaaacaaaccctgccaagatgcatgtgaggggaggttgactgtcgcttcactaccgttcctgtgggaaatgacatcatctgcagcaggggagcaggacacttagcagcacttcccagagtggtgtcccaggacagaggggctgcaatctccaggaaggtggatcatcatctcgctattgtcttaaatgtctgagttatagatctttgagggccttgaactccaggacagcagggaggtagggggaggagtcatccagacttggaaaagattctttaattttacttgaagtgaaactcttgctgctgggagtataagaattcatttcatcaagcaaaaaaagctcaaatcagtgatgtttagtggtgactataaggccaggtgcagtggctcacacctgtaatcccagcactttgagaggccaagatggaaggatctcttcaggtcaagagttcaagaccagcctgggcaacatagggaggacccctcccaccccatctctacaaaacattaaaaaaattagctgggcatggttgcatgtgcctgtattcccagctactcaggaggctgaggtgggaggatctcttgagcctaggcatttgaggctgcagtgagctacgatggtgctgctgcactccagacggggtgacggagtgagaccgtgtcagcgttgggggtttgggggaagctggtggtcatgatgagagcagccaatgctctttgcatttctttatgtgctagacagtgtgttaagtgccttccccagattatttcagtgaatttttcacaataactcagtgaactgggtaccatagttatccttcccgtttactaatgaggacgccaaggcccaggcaggatcaccacatgctcaagctcatgtggctcatcactggcaggatcaggatttgaacccaggcagttggactccacctccaccgctaccctctcctgcttcctgtgggtcaaggcacatccgggaagacagtctgtctgggtctgtgtttgtgacaacggcccagcacttgatatctttatgaaacccttattaaatcaaagaagaagaaccagctggcattttgggacatagagaaatataatatttacattttaaataaattaggccatcaccacagacccagagacattgattattctcagagtagctaacaggaggttgaaatggcttcatattgcgggtcttccagcctgtagggagaaagctttggtttggcgctcactgtaacacagttaaagccaaggtattcagaatagactctctgctcagcatcctgcgttgacacagaagccgtaaataaatttgatggcagagcagttcttggcaagaatttaacaacaaatcttgacatgaaactgtgtccctgctgccctgtgtctgtcaccgtgttgttgagattggcctggacgtgttggcacgtttcactggatggtttgtgttgcagtcatgcccatagcttaaaattttttcccctcagagaaaagatattggaatactgtgttttctctttactcagggtttgcatttggagtggtgaaatttgcacttcattgtatattctgaagggttggcaagtgacaagtcacctgtccttccattttagagatggaacatcaaggtatgagagaactctgttggctgagtacagtagctcatgcttgtaatcccagcactttgggaggccgaagcaggaggatcgcttgagtccaggagttggagaccatactggccaacatggtgaaactccgtctctactaaaattgaaaaaaattagccaggtgtggtgatgtgtacctgtaatcccagctacgcagaaggctaatatgggaggatcacttgagtccaggaagttgtggctgcagtgagctatgatggtgccaccatactccagcttgggcaacaaagtaagaccctgtctcaaaaacaaacaaacaaacaaaaaacagacaccacaagaagccttggaaggcagagggactgggcatcgttgagcaccagagttggccaggcctgggagatgttttctcagtttgatcttaaccatcttgggcagcaggtagtgctaaactcttttacagacaaggaactgagtttgcataaagcatgtcaccttctgaaggccacccagctggcaggtgatggggctgggaggcagcagtaggtttgtcttccctccagaggttccttttatgtcacactgtctccacagttgctggagataggtatattaattttttttttttacttagctatattgaggtataaatggtaacgggaaattatgtggatttaaggtatgcaatgcgatgggtgttttgttgttgttgttgttcaagacagggtcttgctgtgtcacccaggctggagtgcagtggtgcgatctcggttcaccacagcctcgacctcctgggctcaagtgatcctcccacctcagcttccccagtagctgggactacaggcacgtaccatcatgcccggctaacttttatattttctgtagagacgaggttttgccatattgtccaggctggtcctaaactcctgggttcaagcgatcctcccacctcggcctgccaaagtgctaggattacaggtgtgagccacttcacctagtcacatatctcactttgaagaagaatacttgcaaacatgtgacccatttgccccagattttatggacgaagggaaggattgtcattcagtgacggtgatggcgtggtttccctggccgagtgaggacaatggcctcatggagaaaccctgagattttgctgccattgtcagcatcttccctcatcatctcaagtctgggacagtcctctttatgtcctgggtataaaagctccgaagaagaaaacaggttgcaagtggaagtttctgcagccgaggaacggtcgggtgacacttccatggccctctcacagccgcttcaccttgaaagtgctgcggtccttgggttgaatccaggttctcttcacagcgactgccagaggagccgaggaagcacctgcatttggagctattcagtgcatcctggaaccggtgtttggcttattttcttagcataagtagatttctacctaatgggtcatcagtgttttctggggctgagtcattagggaggtgggaggcggatcaattgtttagaccagacatcgcctctgcagtttgccgaaaccacggcttttgttttctttgaaaaggaaaatgttggagtccagtagactttcttaagcagtgtggaggcaactcatgagccgtggggttgggcgaggaagggaagtacactctgttcagaaccctggggatgttcagaaccctgggggtaaataaggaagctcatcggggatcagaccagcagagggactgccttccttggctgccttccccccgggaggtattcccgggaacaaggaagctcatcccctcttaggttctcaccgtgcatcaggcgttgtgcacaggttcccacaaggggtgtcacgttctcctcacagcttcaggaaatctgtatcattaaagtttccacttgtagatgagaaaactgagtctcagaaaggctgtgtaatttgtgtgaggtcacacagcagcattcacaccaggtctcccagaacacacagcccatactatatccccataggcaaatcagaaatggctagcttgataagggacatcatccttgacctgttgccttcctgggtggcaggggcctgggagatgagactctatggaatctctccctgcagacccctaccccatccccacccccagacccaccttccatgtgggaggcgcttgtggaatatttattgattgaaagaggttgaaagaaacatgtttaacaacatatggcccaaaatcataacagtgtttccagatggaggattcatgatgctgccctgcagcttagagtcccccagattaggagtgtcacatggagggagaggttaaacttgttccacctgtggccgtccgtcatgggctgtcctaggactacacacagacaactttgaattcagtggaaagagacctgcgccatcatgactgtttcataataagtggcagccgggcatggtggctcacacctgtaattccagcattttgggaggctgaggcaggtggatcacctgaggtcaggagttcaagaccagcctggccaacatggtgaaaccccgtctctactaaaaatataaaaacaattagccaggcgtggtggcgcatgcctgtaatcccagctacttgtgtggctgaggcagaagaatctcttgaacctgggaggcagaggttgtggtaacctgagatcgtgccattgcactccagcctgggcgacagagtgagattctgtctcaaaaaaaaaaaaaaaaaaaaaaaagattatgggtagtgagtttcttgtgagtggaggtgttgaagcagaaactgggcagttacttggtggctctgtgagtcaggactctaatccaaatgacagaaaactcaaactgggcttaacaagaaatgaagctttttgagtgatgaaaactggacatccaaggattggtgtaacctttggcagggttgcatccagaggtcagatgagcaaatgtggatgttctcttcctgctgttgctctctgctttcttttttgtggtcttcattcttaggaaggctttctctatatgtgatggatcctagcagctccaagcttatgtcctatgagcttagcaattcttgtcatgaagagagggtttctctcccagtagctctaacaagattcttggaattgactcttattggcctgacttgagtcttctgccatccctgaaccagtcactgtggctaaaggatgaaatacactcattggcagggccagggcacgtggccaacagtcagtgggggcgtttggtcagcttccccagatcactaggaagagaggtggtttcttaagaaaaagcaggattccattagccaaaaaagaggggaattcatcttgggcagagagaaaaagagagatgttcaccatgagggtcactgaaaaagggtcttttagcatcaaatgaggaattggagacgatcactttttagatttaaatccaagacataatgatcaggtttagtttcttagccaaaaattgttttctttttcatctttgttttcatcatcgtcatcttctccatcctcctccccttcttctccttccctggagaaactaactagaatggaatgcagctgtagaaatcctggttaatttctcagatgcagaatctggtctctgcaaaggaaggagaatttctattgaagcccaaccttttgtttgaagtcctattctctgtaacggggcataaagacaatgttcctcagtcagtaagcattcctaaccttgagctctaggatgtaagctcagaggaggaaggagcttttatctgtttgttccctgttgtatccccagtgtctagacagtgcttggcatgtaatagtaaggatggatggatgtgggagacagaatgggaagagcatggttttgcattgaacagatttgtgtttggagttctggaaacgttggtctgtgagtcatctggagcagagtgaccacttgggggcagtgtgaggttattatcagtaacttgcacctggtggccaggtagacaagaggctagaactgcgagaacagtcgggagggaccagaagggacgatctcccctgtctctctttcacaaccccggcagcaaacatctctaagagtctgattaggtcacccggagcatgtggtatcttgggcattgaagcatctttgtgggttcttgaaggtctgagatcctccagtggagagtgttcctcagtgtcccgctttatagccttttacgtggagtctttgccttccatccactaaaggggcccctatcctttgtctgtcaccactggcatctttcctctatttacttcaccatgaggttatgagaactcatcctacagtctcttctaagcccctatttccttacctgtagaatgggcataatgccttgaagagacgtgatgattacagtgaaggaatattgataaaggaccaagaagagtgtctggcctgtggaacgcatccaacctatggttactattattattggagcccaaggagagatttgaattgtatttggggctttcacagacaaactcattagaaagtactgcctgggcccatatagcagacagaatacaagtcttgtgatggatagacctgggttcaaattctgacttcaccacttgtgatttgtatgaccttgaacaaatgatttaatgtgtctgagaccagtttcttcttgggtaaaaggatatcatgatacctacttcctgtggctgttgcaaagctgcctttaacaaatgtctttggcctctgtgcctttcctcagactttcaggcccattgtgagagagctaggaagatacagggttgtcaagttgacacatgtcagaataggattggttctgccacagtaacaaatgatcctcaatctcggtctttaacaaaataaaagcttatttcctgttcgtatgtgtccaacatgggttgcccaagggcaacagtgggactgttctgctccacataatgactcagaaatctaggtggacagaggctcccatcttgtggccacaccatggctttctcacttagtgttacagggaagggatggtgcagggtcacacgccagcagtcctatgctatgactcagaagaaacatttgtcacttccacctggaactcgttggccctaagtcagaagcttgtgccctgttgtgcagagggggctgggaagcttggggagcaggtagggtgcatggtgagcaccagtatctctgccacaaggacccacttgttgtcttcatgacattcccattgtagggattagagcagctgtgggctagtgactccgtagctgccaggtcatttccagcacagtgcttcgtgccaggaagtaaagaaatttaggcttgagaccccagcttcatagatgctgctgagaacgtgaactcttttacctctcccagattctgggaggtagatgtggtcttgtaatgctgactgttgaatagaaaacagaagaagatcacatttgatgagccactctgttgggggtggcctaggcagggaagcattgtgatacttttgcacttaccttcactgcgtatatcatggggatatgagtcacccagagaaaaagttttattgcctgttgccctctgcaagggaagaaaagtcacagatgtctgctgcatgcctcctgagggcaagagtgtatgcttggcattttaacatacaagatctcggtcatatcttcagtgtcccatggagagaagagattacagtctccatgttgctgatgaaaccatgaggcttaggggtgttcagagctgtgtagaaacaatggctgccccgttcatgggacacagccagtgaagtgtggtcccagattcaagcccttaaattccatgttgttgttttaaactataccatctcgtctttccattgtaatgtctgtggggcttaaggaagttgtagggatgtgcccagttctgtgtgtcaatcaaagctgtaagaatcagaatcttgtgtcttttacgaagcttgagttgtatattggctcatttagtcctcataacaacgctatcatgtaagagctcctatggccaccatttttcagatgcagaaactgaggtccagagaggttgaatgatttacccaaggtcacccagcaagttactggcagactgggacagaatcctggccgtccagctccaagttcatcccccagaccagtaccccacagtgctcgctcacatttgagcacagtcttccctctgtccaggtgctggtgttcatgaattactgcttggcacaaatgaatggctgcataccccttcctgggaggagcaagccagcctttacctgaaggaggctcttggcagctttacgggagtgctgttgggtgtgagaaagagactctcaaaggaaaacaacattttgatgctcataaaatttaatgttctttcatttactgtctttctcttgaaacttggacataatttattgagcccgtggttgaaatattcaggaggtctctgtgtgctacttcgaagggaatatgattaaaaacgcacaccagcctccactgatttctcaagacatgagaacacgacaaagagccacataatttcagaattcacatctttatgtgaaagcctgtgctttccagcaccttgcagaatgaatggaaaagcagcacttcagggtgaaatgttttccagaaaacttctgacttggtgtgctagtgttagcttcacggtactaaataacttctgtgtccagcaacctattctcggagataaagagaagctgccccaggccctgtgccaggctggctgctctgaagtcacatcttaaccatgtttaaaatcctgctcgatacgatggagccccactttatagccgaggaaatgggagcagatgaatgatggggcttgggtgtgaacctgttctcatgcctcctgccagctgacctcttcctgcctttggcctcagcttagtatcacaagccctaggacgggtagctgcctccccttcctgttcccagggaccgtagtcttcctgctgtgccactggccactttgtctgagaaccgttgaccacctagatccccacgagatagggagctctgtgagggcaggggcaggggcaggggcagggtccttgtcacactgatgcccagagctcagatcagtgcctggcacaccgttgctcaataaatgtttgttgaatgaatgaagaaacgtgaatgaatgactgaataagtaaatgaattagtgcttccaggcctgtgcagggaggtgcatttgacctcttctgtggtttagctgtgtccccacctaaatctcatcttgaattgtagctcccataattcccacatgttgtgggagggacccagtgtgagataattgaatcacagaggttgttcccctctcctgttcttgtggtagtgagtctcatgagatctgatggttttatgagaggtttcctctttctcttggctctcattcactctcttgtctgccgccatataagacatgcctttcgccttctgccagattgggaggcctccccagtcatgtggaacttgtgagtccattaaacctctttttctttataaattacccagtcttgggtatgtctttgtcagcagcatgagaacagactaatacaacctcacaaagggagagggtttataaaataacccaaagcagagagagattgtccagcatggtggtgtgagaaaggactctggttccaatcccacggcctttagtgttagctttgcctaggactaaacctccgtgagcctccatttcctcaatctgtagatggaaccactagctagaatatagaaaccatgagggcaagagtctctcttgtttgctgctgtatccatagtgtttaaaacagggtttggcaaatggtagatgctcagtagatgtttgtggaatgaatgaataaatgaatgaaagaatctgagaattttcagatattgaagataagtttcttaagaaggagccatggacaggccttgtatggataagttaacacaaggatggggcttagggttgggtctggcgtccaatacatgctcagtaaatgtttgctcttaatgacagtggcctcactgtatcctcctcttcctctttctcctcctgggctgcctgcccagcaggctggagaaggctttctgtgctggggaggagaggaggccaacgctgcgctgccttctaactcccaggtcttgggaaatcaatagccgtcctctgcaagccagcctgtaaccactgtgcttttgaaaggagaggccagcagagcctttttaaagtaattccggccccattttcacaggcctagccgagcaccatgttttgtgcttgtgatggaactataattacacccattgtgtggcgccaagtaaaccacctcatatgctacgtttaaggaaagaggcctctgcccctttttccgctgaccctcccataatccatgcagcagaaataagccctacaagtgtctggtgttgtcagtggctttggcagtgatctccagtaacacacgtggagttgggtaagatcctgtgctctgcgctagagctgtgaactgcccaggagacattaccatctgcagaagtgcatgctacaccttcttctgggggagcctcatgtaacagatagaacatgggtctgggcgttagctactgcagccatctccatgtgaccatgggcaagtgttctagtccctgtgggcctcagtttcctcccatataaaatagggacaacaccagcacctagtatgatgtctaagacttctgtgtgcggttgtgcaggttgtacactgcacaacagcttatggctctggggggaccagtgggagctctatctagccgtgctccactcaccgaactcagatatcatgggtctgtggccagttggagcacttccttttattgcatgaaagagcctttatgtcatacatgacgtacttgacatttagtaagtgctcagaaaacagtaactgttgttgccactactactgggggatgatctgtggaggaggtggatgaatggatcgaaggcgttgggcaaggagatcaactgagatttgagtgacgttgtgaagggtggatagcattttaggatgtgggcacagtgggaaggtgggggtgcagccgtattctcgttccatccatgtcggtccttctcttgaaatgttttctgccctctcctcccacctcctctcccaccagttgcttttatgccatgccaagaaaattagtggaaagccattgaagaatttttttttaagtttggattgtggacaaatgtgaatgtggacagaatagtagaatgcacctctgtgtgcccagcacacagtcccgtcagcttcagcagccaccaacccaagccagtcccactcccccctccccaccgccattcctagtattattttgaagcaaattgcagacatcatgcaatctagtttgtaaatgttattgaaggattttaagcagtaaaggggtgtgatcctgggttttagaaagatcatttgagcgtcagctggtggcgggggcagcagggaggcggtggtgtttgtctaggtgggagggggcttctgaacctaggtttggccacaggatggaggagcggggacagaccttggagagatgaaggatgtagattctacaggaccagtggtactggacacttctgctggtgcctctttaatggataatcatggtaattaacatttatggagtactttacgtaaccctaagtaaagcacctctttcttttattatttaaacctcacaaaagccctttgacatttgcatcgttgttaatgtgattttatggatgagaaactgaggcccagagaggtggaggtaagttgcccaaagtcacatctagggagtcaggaatggtgggttttaatcccaaatggcctgcctctggcgttcgcaccacgccgcacaccctctcccgtactgctctcacaggacaggtgtgaattggggaacccgcttaaagaccctcacagctgcatgagtgcctcttgtgtgttcttcttaaaggaacacacctttcagcagagggctggggctccaggttttgttttttgctttctttcccctgtcattgctcaccaaccaccaggaaggtgttggctgctattgtaacatggtcatttctgtggattctgccttggctcttggagggctgttgtaggggccaggagagcatcattgtctccagtggggtagcagctgctgctctatgaagcctccctccctggcttgcctgtgtatattctgaaaggccacatgtcgggagaaatgatgaccaacattggggcctgagacctggcagccccgtggccaagcgatgacggtcacctaaacctctgcttctcagaggcgtccccttactaactgagctgtttttagtgatgggtgttgtccctctttaaactgtaatcccatcctgatgtgtgtaagcattacctcttgctatctcagtgttctgagtgctgaggggcttgttgcagaggtgatcaagggaacctttgaaatgtgaagttatcaccagggttacttaaaagcctctgcttagtgactctgcagacagagcctacacagcactgtctcggtggcacttcaggatgatctgccccacaggtctcagttgaatttattacatggtggctttatggtgcggcattgaggaggatgagtcccgagattccagagcacctggctcatcagggcaagcctgaataacttcctggggccagccgtccccacagcagaaccaaagcaaaatgtgtattggaaggaagaaagaaacaggagagactccaaagatgggagatgcaggaccatgagcctccatgcaggctctggagccagactgaccacctccctcccttccagactgcatgacttgggacattcgagtcacccttctgagcctcagttttccttatctgtaaaatgggggtaaatatacacctcccaggcttgtagtgtctgctaatatgtaaaacacttagagtgctatcagacccatagcaggtgctcattctgttacatcctgtccacatcatggcaggtactggtgactgcccgagaactctttcatccctttgtacctcgtgacaaacctgtacaataggtgacaataacctcatttgacaaataagataccaggaatcagagctgggtgtggtgggtcatgcctataatcgtagcacttcgggaggctgaggcaggaggattccttgagtccaggagttcaagaccagcctgagaaacgtagccatatcctgtctttacaaaaaaaaaaaaaaaataggtgagcatggtggcacatggctgtagtcccagctacttgggaggctgagacaggaggattgcttgaacccaggaggtcgaggctgcatgagctgtgattgcaccactgtactccagcctgggcaacagaataagaccttgtctctggaaaacaaaattaaaaaaatagggtaccaggaatcaaagacgtgtgattctttacacaaggtcatccagcagtgagtagacaggacctggatttgacctccagggcctcatttttctccttgacatggaacatctggaagtcatgtctgccagtctcctggaatgtcttcatgctgggattttcgtttgaagctgttgtcggtgttgccttcacctgaagcagaaaccattttggagaaggcttaccctagctgctggggagctcctagactcttctctgggagtctcctttggccttgcattggccgaggttcttacttactctaggtgccccttcccttactgctagggtccccctgagggggatgtgggagcagccagagcccacatggcttttcccctctgcctgctgatggcagccattcactgtggcgttgacagcgcctttccccggctctgtgtgtgtgtacatgtgtgtgtgtgtgacagtgtcccttacctttgagatgctcccagccctccatccctggctcagcacccttccaggtcctctgctcttcactggtaccttgagatgctagctcagcatcacagtgatggcgtatgctgagagggaggagagaggagtgtggccacaaacacaggctggggaatccgaatcccagttctgctgcttacttcctgtgtggtcttggacaagttgcacaccctttctgtgcctcagttttcttagctacaaaattagggacggtaacaccactcacctcccaggggagttgtagggtacaggtgagtactgctcggagaggaagtggaacattcctcgtgagcagggagtgccccctgagtctgcccacccctccacactgtcaccatcgcccctctgggaagacagcgcccttagtttacagaacacttccccattcctcagcttgtttaaaagtcttgtggcctcccggtagaggagcagagagcgctgaattaaaagcaggaagcttggtgtgtagttgtggctctgttagggagtaaaataaactgtgtagctttagacaggccacttgccccccgccaagcctacatttcctcaaataggcacagtgtttctcttcctgggttatttatttgttgcctgaaaggccatgtgaccagaacagcatgggctttggagccctaataactgggattcagatttcactgtcactccctggacccaccgtgccaaggtcaaagagagctatggctactagaattccctgaggatttcctgtgactctgtgtctagtgctagatctggacacccattatttcaatgaacatttctagttttcttagttttcaaggctaaatggacactgtaagacaatgtacaggttgagcatcccaaatcccaaaatcccaaattcaaaatattccggaagtcagcatattttgagtgctgacataatgctcaaaggaaatgctcattggagcatttggatttcagattttcagatttgggatgctcatcctgtaagtataatgcaaatactccaaaatccaaaaaattcaaaatccaaaatacttctggtcctgagcattttggataagggatacttgtataggcatctaaaagaatgacaggcgttgatagcattggttttatctcatttttcttttcaactctcttgaattttatccaaatgtgtctgcagtttggctttttttcattattttttatacttgtttttcataattattaatgcaagaaattgcttcagacacagcacttataggtcaatgcttctaaaactatgggaaccagttttcttttttaaaaaactttcaattcattgcagaatgatattttgctaaatcaccaaaaaacagtctagaaaaaccctgaagctcctgtttcacagcaatatgaaattgcttgaaacatttctaaatgcttgcttccagtttctttcctcctctgatgttatactggtagaaaacaggtggcacacccacaccagtttgtgggccaccctgtgcatgtcactgtcatagagtcacttgccgtgtgtgtgtggcacttgctgtgtcattattgaggtagcaacactgcatgtgacagttacagttggccctctgtatctgcgactctgcatctgtgattcaaccaactggggagcaaaaataccgggcggggagaatgcatctgtactgaacgtgtacagacttttttccttctctttattccctaaacaatatggtagaacaattatttacatagcacttacatcatatcaggtactgtaagtaatttagagatgatttagagtatacaggaggaggtgtgtaggttctattgcagatactaaaacatcatttaatagaaggtactggagtgcccatggattttgctatccgtgtggagtcctgggaccaatccgccacccataccgagggatgactgtaccgccatccgctgtgggcaggcagggttcatgccattttcttctggcttgtggctttgttcacatcagcgagagttcagaggtggagaggtgacaagtggaggagcttctgcaacgtccccgttttacaaatgaggaagaggaaaactgtttcctacaagtagggaatggcccaactgccgttcaaagctgagtctgtgaaatgctccttttgtgtttaccagtggctctcaactctgactgatcattacagtcaccgtgggctttaaaaagtacttctttgaggtccttcccctcagtctactgaatcagaatttcaggggccaagacccagaaatccgcatttttcagaagccctcccagtgactagtgatcagcttgggttgggagccacgagtctaaactatgtcacttccctctactctgcagtacaaatgaattgtccttaaccaccaaagggatcatcttcctaccatatcccaagagggagtgcaaagagcacagatagtagggccattaaggtggaggttcaaatccccactctgtcacttccttgtcctgacatttgaggcttataagccaacctccctttgcctcattggtaaggaaagcatgccagccctgcagggggattgtaggaattacatgagctggtgcacctaatgcctataagaggcctgacacttagtttgctccggagtgtgtgaacgcaaagtggggactgtctaggttcactttttaacaaaacaggtgcaatgccatcatcacagaaagaggcttcaggcccctccccacaaccagagtaaactgggcctgaaaacgggttgtgagttttataaaacgtaacagattctaaggcatcgaagtgaataatcttggagagttttgagtatgtgacccccaaagagcctcagttgctattgaaattttggggggtgtcttgatctaattaatcaagaagcatctaatttgttagctggaggagggtgaagcatgatttacttgaatgtgattagatggagggaacattctgatatgaaaggaaatgccagaggcgtttttgaaaaatttgtaatccttttctgatttggcaggtaattatgataattcctggtatttttacagacttaaaagttttctcacagccacattatttttggagatcatctttcctgatactccagctggaaggaattactccatctcctaaagctctgaaggcatcattttccaaagcccaactcaaatgtcactttcttggtggtgctttcccccatcttttaggccagggctaccaaataggcatcatcttgctgggcaacacactgattggttatgactgcctaggtatcttcttgaggaacagtgattgattagtgctgtctgccaagggaacagcgggcaggggagtagtggcatcctgagatacttacccagtcccctttgataggcattgaggtggatcccagccatttggagttaaacttgtattttgagctcacatgcaagtagagaggcaggatttctgcccagccatgatttgttaaatcgaaggtgagtgatttaaaaaatttgatagacttggaacccacccaaatgtccaacaatgatagactggattaaagaaatgtggcacatatagaccatggaatactatgcagccataaaaaatgatgagttcatgtcctttgtacggacatggatgaagctggaaaccatcattctcagcaaactatggcaaggacaaaaaaccaaacaccgcatgttctcactcataggtgggagttgaacaatgagaacacatggacacaggaaggggaacatcacacaccggggactgttgtgcggtgggggaaggggggagggatagcattaggaggtatacctaatgctaaatgatgagttaatgggtgcagcacaccaacatggcacatgtatacatacgtaacaaacctgcacgttgtgcacacgtaccctaaaacttaaagtataaaaaaaaaaatttgatagatgttgccaaataggcaagttacttaaacttcttgaatcttctaccttctctccagcccaaaagatgaaacccagatgatgactcatagtctttgcacctcgttaactgataagttgtgcaccttgcaagcacaagttcagaaccacaacttctgctggctaggtggtgtccttgggccttttggagaatcaaggcttcattcctggtcctctgtcccttgctgggctgggtttgtggctgtgtcagccctggtctttgtatctccacctggcatttacttttgatttgtcactgtcatagtgttgtcaaatggcatctcctccttaactacctgcagatggattaattttcatgaaatacaacaactgaggatagaaggaagcacatcagactctcaaactgatgatgtcaggacacaagtgcctggtggggatataggcgtgggatataggcgttggatatggcatgggaggctgcctggcatgtcccaaggctcattagataggtgactcccgaatgttaactcttggaggggtgggccttccctgacaccctgtcttctctccgagtcactctagcataatttaccaaatgtcaaaggatgtgaactgtgtggctctcctttctcctccctaagatcctagcactgtgcctggaagatggctagcaactctgtggtgctcttgcttcggggcacactgagtgctccccacagcatttctatctccttggtgtggcacatcatggcctttctccatctggcccctggacacctacttgtctgccacttcctccatgtctcctgtcatgatcacccatgtcataaaaccagctctcatccactgggaacttatcctgccccagatgtgctgccaagcctgctaagtgcggcatctcttgccatcctcacagtggcctggtgaaatgggtgtggtttttaatgcccatttcatagacgcacagccacaggctcataccagaacacacacactgtcagtaactgatcaagcccaggcccatcttgcaccaaggcccgatgcctgaaccacctctctccgcctcctccctgccagcctctggtgccggcatttgcacctgtagtttcctccactggtcatacctttctcttccttgtctccagggtgacctcttattgctcaacatgtttatggagcagagaaggcctgtggggactgagtgagttagtgagaccccaagagggagaagggggattggagagaaaggctggggctgcatcttgaaggagtttgggttttactcttaaagcagtggaagcactgaaagtattaaacagcaggtgacaacattagatgttactttgggaagatcattgtgcctgcttggaggagaatggattggagggcacctgttctctctctgtcctattttctgtgggtgttgaaaaataagaaggtcagatgagaacccataagtgccctcaaagcctaataaaaattccaagaggcagtggttgtgcagcctacttttatttttgtgataacaggaactctttgtgatctcacattctctcttctgaggctctttctgagtcttgaatttatttctagttatactggagtttggaaatagttattcgaggaacagtaagctcagtgtggtttatgtaagatgaaagctgttgataccaatggctgtaggtagggatatgtgatataaaaactcagagtttcagaggttagcttagtaacaatgaacatcatagttttaatggttgctggaaattatttgatcaaattttgtctcttaagttgcatgggatttttccttttcattccctagtgaaatgaaagatttgcctgatgtggtcaagttctgctcttctggctgtggaagagcaccagggttttgacagcttatggtaaacacaacttggatctgggacgtttcggtgtttcctgcatttatggaaaattgcagtaacactctggctcccactgcaaaacaaaacagaaacaaaacacaaaaccctgcttggctttggaaatggcagtggcatttatttaaggctcacattttgtgggggcacattggcaggtatttagcagtaatatcggcagctgtggatttctggtttgctgcgtggtgaatggattcacagcccagaggaagctcgtggggggtttatgtgatttctgtgtggaggaggcacaaaggcattattagcagtactgtgtttgtttgttaaaggcccaaagacgatcgactcaaccttttcttatccaaaaggaataaggtaacaaaggaatattaattttacatctgtacaaagaaaaaagctggcagaaaggctcagtgacttattctgcctttgttaattgcatggttcttgcagtatcttttgtgtcattttcacttactatttcatatttcacactggtttgaaagcgtctgtacctcagggacagaagggggtacctttggaggggaactcacagagcaagttactggaagcctgatatatttcatgttgattgcacagtggctcccttgtatttcagatgaagaattttaattctttataaagggtctaagtggcttctctcactgatgaaggggagctcaaataaaagtagaaagaatgagaaggaaacatacccctttggctatcattcatatcttggcggattctcttctgtgagttacccttcatacaacaacaaaaaaagagggctcccttttattcctcctcagatacgacacacatttagcgacccctgttttttccacagagcttctccctgtatccctcctttactctgacagtgtcttctgtagctcatgtaaagtacttactgcaaatggcctggtattgttttcgcactgcatacagtgtagttagtgcttaggtgagtcctggggcgttggaggggtgatctcttgggaaggttagggagctaggggtctagataaggatctgcctgacctcgcattctggggacttctcttaaagatgcttgcaggattcttccttcagggttcttggagagtgtagcaggattacatctcacatttctctaaaaggcttaagtaaattatagttgaatagtctgtacattgactatagaccatctgtagtcacctccagttttatttattggggatcagctgagaatatcgaataattcaatttggaaaaattcagcagcttacagctggcccaaatgggttgcatgtgggcagagtggagtggcaggaccacagcgcatagccagggctctggtgtcagttccttgttagatgtttgaccttgacagagcgagatcttattaaaaaaaaaaaaaaaaaaaaaaaaaaaaaaaaagagagaggaaaaaaaaagcccaaggtccaaacatgatctgataccatcctatttggaccataacttcatactgttgactctgaagtgtcggtatgaagcaggtcaagacacattgagcttatgggtggattgcatggttcacaggtaagcagtgtcattgactccagccccaacagcctacagatgttttgctgacaggtgtcaggaaggagagtccagagaaggcgggattggtccctggggaatgtctgcctctaagcctcacctttccgtgcttgtgttccaggtggcagagatgcatggcgagctgattgagttcaacgagcgcctgcacagggccctggtagccaaggaagccctcgtgtcccagatgaggcaggagctcatcgatctccggggaccggtgagtgtttccccaaccctgtgtgtctgtcaagcctctgctgcccacagcccagtagaaaagcacagagactcacagagcaagcaaccatgcatccactggccagatttgcccacattcacctctgccacatttgctttttattttttatggggagggggtagaataagtaaaatgttacaagttctgttgaagcaacatttcctgtttctccttctagtcatctatagttaaaattggcatatagtcccctccccccgcaaacccatctttccatactttactacatgggtaaatttccatgagcagtaaacagtcttggttttgtgttgttaacttttacctacatggtattactgttgtatgtatctgtttgccacttgtttttgcttatttgtttttaattgaatattgtggtttgaggagtaatccacgtacatcaggtacagggcttttcaaccacagcactgctgatattttggatcatgtgattctttattgtgagggctgttctgagcattgtgggatgtctagcagcgtccctgggttccacccactagaggccagtagcttcacctcgccaggttttgacaaccacaaatgtctccagatatcgccagatgtcctctgcatttcagaacctggcagaatcacccctggttgagattcgctgatctagatcacctacttgcttggttctgtagttctctgttgaatgaaatagcacaatattttggattcagtagtgtctttgtaaacatttaggatgtctccagtattttgctattacaaaccacaatgccgtgagcatctaacacttgtccttttgtgcagacatataatagcttcctcattttacaacttctttattatgtaaaatgcccacattcaggcaggctgtgtaatgcacgctcatatatcctttgtcagggtgaacaattatccgtcacggccaattgtgtttcaggttatctacatctgcttcctcctcctatatcatttcaatcaaattctgggtattatttcatgtatagacatctttgtatttatctctaaaaatacaaaaaaaaatacaatatccttatcacccccattaccagtaattgctttgtgtcatcacagtcagtgttcaaatttccaattgcctcatacctttgaatagtttttttgattcaggatccatgtgagacccatgcattgtaattggttaatatgtctctatgttgcttttcctttaaattttaaaaattagggtaaaatatacctaacataacttgtaccattttaaccatcgttaagtgtacagttgagtggcattaagtacgttcacacattttgaggccatcgccaccacccctctccagaacttttccatcttccccgactgaagctgtcccctttaaacagtcagtgcctgctccccactccccctagcccttggcgaccattctactttgttcctctatgaatccactactgtcttaggtttcttttcttcaacagagtcttctctcatctctctctctccccttctctctcataatttgtttactgaagacactggatttgccttacagaggttttcaacccctcagctttgctgatggtatctctgtagtgtgattcgatatgcttcttcatttcctgtatttccttaaattagaggcttggattcaggtttaattttgctgattatatgactgtgtcgttgggtggtgttttctgtcaggagatgcctaatgtttgctatctttttgtgatattaacagccatctcttatcacttcctgggtccattacacaaacgtttctttaaggtcagtacctaagtgtgaaattgcggcgttttagtgtatggcgtcttaaactttactgagttttgccattttataaagtaaaagcacctatttattaaccccctgtttgtgtgcaaaagttcctgctgacgcttttacatccctgctgtgatattttatatatttgtgttttcatccgctgttcctggcccataattcccgtagcccttgttgtaatgttggaggcactttaggcctcagaagaagggcagatcacttgagatcaggagttcgagaccagcctggtcaaaatggtgaaaccccgtctctactaaaaatacaaaaattagccaggcatgtggtgggcgcctgtaatcccagctactcaggaggctgaggcatgagaattgcttgaacccaggtcagaatctctctgaccttctcctgctctcttttcacctcttcctttttctacccaaggcaggactctaatcttcccctgctatccataaagaaattgacccctattgtctgattgtaggtcacaagacccccatttcagaaggggtccagccccgcaccctggaggaaagaatactgcacagagaagccaggaagcatctggacagacaggccttgcagggtctccccactcagtctgttcgtcttagaccataccctttttatccaatcacgttgttaatcttgattatccagtgatgtctccataaaaggcccaggaagacaggattcagggagcttccaggtagctgaataagtggagattcctggaggttgatacatggggagagcatggaagctccgcaccgcttcccataccttggcctgtgcatgtcttcactgtatcctttgtaatatcctttataatcaccagaaaatgtgtttctctgagttctgtgagctgctctagcaaattaatggaacccaagaagggggttgtgagatccgcattttattgctagtgagtcagaagtacaggtaaaataacctggggcttgtggttggcatcagaagtgaggggcggtcttgtgggactgagcctcaccctgtgggatctgatgctgtctccaggtagatgtgtcagaattgaatcagaggacacccagctggtgtccgctgcagaactgattgtttggtggtagggagaaacccccacacattttgtcccaagaagtcgtctttgttgatggttgtggtatgacagcagaaggaaaatggttcatgttttcccacttgtacctaccaatacctttttgcatgagatgggtttaacttgcatttccctgaccacagatgaggttgcctatcttttcatttgcctgttccccattctgggtttcacatatgacttctcacagcctttgtccatttttctactgcacagtatttggttttcttgctttctcactgtttttatatctccttttcagttacatgtattttacatatctgctcctagtctttggcttaatcattcactttaaaagtagaaaatttaaaacatacgtaaaagcagagggaatgatgtaacaaaaacccatgtccctatcactcggcctcagtaataatcaactcaaggtcattcttgctttgctcatactctactcattacttctcaactcacattatttggatgtatatccaatccatcttatgctttcattcataaatacccaatatttactgctaaaatatattcacaataccattatcacacctatttttattttatttatttatttttttgagactgaatcatgctgtatcgcccaggctggagtgcagtggtgcgatctcagctcaatgcaacctccgcctcctgggttcaagcaattctcatgcctcagcctcctgagtagctgggattacaggcgcccaccattatgcctggctaatttttgtatttttagtagagacggggtttctccattttggccaggctggtctcgaactcctgatctcgagtgatctgcccgcctcggcctcccagagtgctgggattactggcgtgagccaccgcacctggcctaacacctattgttaacagtaatttcatgatatcatgaaatacccagtcagtgttcaatattctccagttagctcaaaagagttttccatgtctttgtgttgatcaggaccctgataaagttcatatagtgcagttggttggtgtgcctcttcaggctctgttaatttgtagattcccttgctgtcactctcttttttcccttgtcttttttgtcattattgtggaagacacttggctccttgaactgtaggttttcccagttaggattttgctaattgcaatcctatggtgatgtttgtcatgttcctctgtcccttaccttgcctttaaattggtcattcactctggaggcttgatgagtttcaggtttggttttttgccccaacgatgtcacaggtggtggtgtgtgtttccatcaggaggctcataaatgttggtctaggaaagcactattggaggtgcgagttcacaccagaccccatttgtttcagtggggccagtatacaaatgtaatccccatccccccaccccctaccgtattgaaagcctaatagtgcagtccctgactgagtttgcttccctaattcctgacagctccaagactttgtacatgtttttgtggatttctttaagtaggtagttaggagtttccttaagaggaagcatatttaggaaggacctgttgtatactaagaaccctttcagggaggtgatatcatctccattttacaggtttactgaggttcagagaagcctccagtcattctgtgagtgtgtatgtaatagagcctggattcagactccggtttaattacaaagcccattttctttctccaagctacaccagctctagagaattgcaggaacgggtatgggagagggggtccccttacggtacccatttccaccagccaaggttccagcatccctgcagtggccctgccacccgtgttgcacattagagacttgggcagcatctaatctacctcctctgagaaaggacaatgggatgtggggatggaggcctggctgtgacctgtctcccagtgtgagtggggtaggtcttgaaggtgggccagcctctctgttgtccctgcccaacaccaggggtcccagcctactccaaggctagccttgcaagagaggggctcagtgggcagtcaggaaccaggcagtggtcccatttcttaggacaggttcagtgtcaggtggtaaatggtaggtgactgttgtcactgtagataaatttttggagagcaacgtcagtgcatcattctcattgtggataataaaacccgattaacctgtacaaatgaataactgctgatattaatagctaatatttattaattgatatcagtcaaaaatttggcttccctcttgtatattagtaattcatttaatcctcacgtggcctaatagtaattaatattatgatggccattttgcagaagacaaagctgagactcagaaatgatgcaactctcccagcatcccacactgagaagtggcacttctggatctgacttaaaaaattaaatttttggttttttaaatttatttttttcttaaactttttttcatattatacaatatgatatactaatggtaatatttttgcttttaacagttgggaagtatcaaaatttttagactcatgacaaaccttagcatccccatgctaagaagttaagtagtaaaaaagggtgaaataaatttcttcctttctcttaccccctgattttcctacctggaatctgtaactgttaccagtcttgggtttctctttctaggtatgagtgatgcctcagtacaccgctttattgcgcctatacatgttaataacgagcacatgcctatacatgttaataacgagcacatgcctatacatgttaataacgagtagcctgctgaattccttcttctgtgtcctacctttcctcatttaacagtgtgctttagagatcttctaattttacttcacgagtagaattgttgttcattttaagaaccgtgtcttgttcccttgaactgacaaaaccgtaatggatttccccaggtccctgttggatgttgcatagtttcccgtttttgtttttacagtaatgttgggatagcatcctgggtggaaatcctcagtgtagatgaaatcctccctttagcctggaaggctggctggcagtccacagggctcagttagactgggtgaaaacccagagatcttgccctgcaggactcttggggctttggaaagggtgaccacctcctcccagcctcctccacctgctgcaggaatatcccttttgaggctcaaaatcctttcagaggtcacgatgtagttccaacaacgcgttgggcatccaaattaagtattttccctttttatgaatttgacaactgagttgcagaaggattttggctgctgcactccccccccacccccccccccaccagtttctcctcatgctcccccagggtgctggacctcctgccctgtgctgccccccacccagggcctttgttcctagtgttccctcgcctggaacactgcccagtgccagggctgcatatcagctcaacgcttcctcaggaatcctccctgaagccctgacaaggtcacactttccaagttgactatgatgctgacatgtgtctctcccttcctgtcttaatgtcatgttacattgatttatcactgatcagtgttatctttcccgcgtccacaagggcaagtttttgtttctttctgctccctttgggtttcagtgattcacatggtaggtgttcagtaaatgtgggtcaactcattgagtgaatgaatgaatgtcaccagtgggcccccatgccatgccagcccatctctcctctgtgccatgctccctctgcccaagtctgatgccctgcaggacagagacagccatttacacagaggcagctctcgtcatcagatcctttcctctggcaggctgtgatggccagaagggaggagcaagtaaaacggtcactaagggcctgaaggctgtcagaagagcttgccatttggaccgggtccccaggggataccccattattgcctcaggcctgctttggtcgtcatctcagagtcagacagccagggcagaagaaagaaggccgtttccagctcagttttcctcctggagtcgtcttttgtttttttctctggcttttcactgtaagaggcatctatttatgggaatctcagccacttccctcttcctttccatggggcctggatccctgaccacactggattaggcttcctcccagacaccagggtgttcgagtgactcagggtcaggactgtctactttaggtggaaacccaaatctcctcttctatctgctgggaataaacatagtgctgaccatagtgcgaggttctgtgagattctgccagtgaaacagtgctctctgtgctggccctcatgtcccatttccgactccgatcccctgtgcctagcaccattcccagcatgtagtaggtgctcagtaaatgtttgctacatgatgacttcattttcatagggcagaggctgagtgcatagaccaaatgataattcggaaaaaagagatgagcagggttagtttcctttcagtggtatctttttataatgcaggttgagtagctcttttctgaaatacttgggaccacaagtgtttcagatttctttacattttggaatatttgcattatacttgtgggttgagcatccctaatccaaaaatctgaaatctgaggtactccaaaatccaaaattttttgggtgccaacaggatgctcaaatgagattggaacattttggatttcagattttaggattaggaatgcttaacttgtatcactatatatactttacttttttttagagacagggtcttgctgtgttgcccaggctggagtgcagtggcaccatcatagctcggtgtaacctcaaactcctagacttaagcaatcctcctgcctcagtctctggagtagctaggactacaggtgtgcgccaccaagcctggcttgtttgttatgttatgttatgttatgttatgttatgttatgttatgttatgttatgttatttttgtagaggcaggctctcactatattgcccagactggttttgaacacctggcatcaagcgatcctcctgctttggcctcccaaattgctgggattataggtgtgagccaccaaacttggcctgtgtatccttttaagctaagacacttttaaggaacaggagtttgggattaaggattgaatttttctctcttcttctttttttttttttttactgtgagtatttttaggactcttattatgtttttcccctttggtataagatgtgaatgaatgctggagatttttaccttttagcgggatttgattacactctgggagaagagctcccggtttgagtaagaaatggagacagggaaatagaaccttgtaagactgcaagttatagaggtcaattaaagacacagcgcggtgaaagctaaaggtgaagccactcattaaatgcagtttgttcccatggtggatgcaaacacgagctcacttcatataatggacattggattcctctttattttggtcccactggcaaggctctgtttctctgtcccgtttctgatcacctccacttaagcagaaaagatggcctggcttggtaagacttgctgcctgtggaaccactgccctgactccaagcatccatgctgtcggctccttccccaccacctccgctctctcacttgtcccttcccttgtctgtttgatgagggaaccaccctttggcagagctttgctgtgtgtttggtgtgcatttttttccttgcaccctctaggcagtccttataattttcttattaggcccatttttcagctgagcaaattgaggtacagagaggttttgtgactcacccaaaggcacacagcttcatggtagcacctgaatgtaaacccaggactcttttgttccataccaccacactgctcactctttattttatgttttccaatttcaagcaaaatatggtgtctgttgtgctccaggcacagcactctggatggttttaaacattcagatacttctgtggtgaagctcttaaacatgcccattcttcatctgcgaagtgaatctctccctttcttatctctccttctcacttcatacatcaggatttgtgtgtgtgtgtgtgtgtgtgtgtgtgtgtgtgtgtgtgtgtttagcatactcatcacatggtgtttatgtcaggctcttcggaggccgggcgtggtggctcatgcctgtaatctcagcactttgggaggccgaggcaggaggatcacttgaggtcaggagttcgagaccggcctggccaacatggtgaaaccccatctctactcaaaatacaaaaattagccatgcatggtggtgcgtgcctgtaatcacggctgcttgggaggctgaggcaggagaatcgcttgaacccgggtggcggaggttgcaattgagccgagatcacgcaactacactccagcctgggtgacagagcaagactccatctccaaaaaaaaaaaaggctctttggaaacttgtaatctagagaaggcagagttgcccaaaagcagaacagtgggccgggcgcggtggctcacgcctgtaatcccagcactttgggaggccgaggcaggcggatcatgaggtcaggagatcgagaccatcctggctaacatggtgaaaccccgtctctactaaaaatacaaaaaattagccatgcgtggtggcgggcgcttgtagtcccagctactcgggaggctgaggcaggacaatggcatgaacccgggaggtggaggttgcagtgagcagagatcgtgccactgcactccagcctgggcgtcagagtgagactcttgtctcaaaaaaaaaaaaaaaaaaaaaaaaaaaatcagaacaatgattgagtggggggtttgcatagttgcttcatatatttttaaaaaaggacctggggttctgtgatgcagtaagcctgaaaactgttggattagagatagtttgatagtcttccttactgtgggatttccctcaagggtcacacacgggggtgctccgtgcttctccaaagggatgggctaggtacagcagcatttcccaaaattatttccccaaggaacactattgcagtcattatgttccagaattatttccctgaggaacatcttctctaagaagatggtcatggagctattttccgacgagtgcatctgggaaaggtagggccattaaatgtcatgtttttttattgatgtactagctagcagggagctcatcagagcctgccttatctcatgagcctgccctggcatggagtctgcagggcccggaggagaggaagtgacatagcgtggctgtggggtgcagtgggcctgcctgtgtttagtcccaggtccaactggcctcccacccactcaccagcctggtcagagtttggtctagaacagcactgcctttcccaggaactttgggcctctgccacctgggctgtctcttatattctgcattttctcccactctctccatttctcctcctgttttcgtgtctttgtttcttctttggtctctgtgtgcttctctttttgtttttcttttgtgtctttctctccctctctctccttttgtttctctctctgctcctttctttgtctctgcctctgtctctctctctctctttcttttcctctgtctgtctcttccccctgcctgactctctctctctgtggttgcaatcctctccctctcccttcccttccactctcccattgtctccagtttaataaagatttacattgctgtatgttaccatgataattgccattcattacaattgccctgaaaaactacaaagcctttccatctccccttcatcatccaagccttgtgtgttttgtgagggtccctgtggagtgggccattgcctgccttccagcatatggctgacccctgatgagtgtttctggagcactttgtgctgtgttgtttgccactctgcagtaccacttggcgttgacttccattttcccctgtggacctggagcttccctgagacagagactgttgtcttcattttcctaccctcagagcctggaacacgtaatcactcagggagcatatgacgtatacatctgagtgtacacctggagtatctctggcaacactctgttcactagcacgttcgattatccagaaagctgccttcctgtcttgctcaataacacctcatgtgggtcctcgctgtgagccgtctgtgttacctggggcaccttgcttcctctgagatgactgagctgatgggagagaaagatgagtaatttcatatccagggatgagatagatggaaaaaccccatcccaagttttgtaataagattcactatacaataaaatgctccctgggactttcttggtttctttaaaaccttcggagggagtgatctcatttgagggctgatgcgatttaagtatgaaagcttaataagaaatctatttttctgccgggtggcacttgccgcatagctaatgatcaagtaccaaactgtctcctgtcccacggcaatgttaaacttcgtgttccaaattataagaggctttttaactcagcgcttggacatccctgttttaatcatctgccgtcttgaaggagattatttttaaaagtgccatttaagaggggctactaaaaatatatctcacatagaggcttaactcagaaatattagcctttgacacaaaattatttggaaagatgcttgtggaacccactttaaacctctagatcgagagaagaaaagcatctctttgggcctagctgtgttttcctgaccatggccaaataccccaagtgatcacatgctccttgctgttcatgcaggtgcttcttgcacctggggggagttggaagtattaatatcacagagctttcttttctgatgcacttgtgtgaaactcatcttttacatggcttgctcatcaccatgggtggtcagtttcccctggggacccatgaggggctggactctagggtttgagtggaggagtttggttgtccaaggcatccagctgtggaactttacacttccctgaagatcaaagtttcgtgtcagctggcaaatgcagtgtatgcaagcttatctttaaagctggtcctatgttgatgcaaatagaaagcattggcaaggtgcaaaataatcaagatttagaaacttggtactctataatgacttcagctgtgagtcaagagaggcattttccacactggcttacatcgcctgtcggtcactgtgttttgtgtggccactttacccaatgtgaggaagactacggagatgtagcagacgtggaaaatacagtccctgcctttgagaaggtcaaagcccagaatatattttgtgtgacttgtgtctctctggcttcacttcatggttatttggcatggagacagaggtcctgcttggataatgctgagatctttcctgccactgatcctgaaggaatagaagctgggattggaaggcagctttttacccctccgttctacctgtcctgtcttctcttctccagcatatgtttgtgaatgcatggtttgagtttgccgctcacaacgtcacctgcaggagaagtgacaggcagcggccaccaggattctcctggggctcacgtgccccttgttctcattttagttaccacccattccttcttgaaatggcctctctgttctttgaatttcatctgaaccgggtgcacagatatggattcatcaaaatcctgagctcatgacccacattcattattggtgcaggaaggcctgctctgattgaataagtaagcttcctctgatctcattcttggtctcttatagaaactgcccccagactccactcacctctcccacagggagtaatctcaagaccctggttctttgctcctgcctggtatgcatgttattagcatgttcatatctttttttttttttgagacggagttttgctctgtcactcagactggagtgcagtggctcgatctcggctcactacaacctccgcctcctaggttcaagcaattctcctgccttagcctcccgagtagctgggattacaggtgtgtgccaccgtgcccagctaatttttgtatttttagtaaagatggggtttcaccatgttggccaggctggtcttgaactcctggcctcaagtgatcgacccaccttggcctcccaaagtgctgggattacaggcgtgagccaccgtgcccggccgcatgttcatatcttaatatgatgtcatgagcatgggaaaggggttcctgtgcctggggcaaccgcgtgggactcctctagaagctggtctgggccaggtcctctcctgtacatggtcaggtgatgacactgtccttgaccatttcatttctgtcatcctaaaaatgtggaccctcccagtgctttccattctgtctcagtgccaccttgtaaatctcactggctatgacgcatccctctagatactaagttaatttgttcaatttctgctaaattaacacacacagtatttccagggatacataataaccacatgattatgttaatagttgtacaagtcttctaactaaatacattatacttattccttaatttaatatatttatttccctgcattgagggttcacttcttgttagtcacaccttccgcacaagttgcatctgatgttctatgtattttttgaacgatttcttcttatttgaaaaaatctttctttgaggccaggcacagtggctgatgcctgtaatcccagcactttgggaggctgaggtgggctgatcacctgaggtcaggcaggagtttgagaccagcctggccaacgtggtgaaaccctgtctctactaaaaatacgaaaaagtaactgggcgtggtagcatgtgcccttaatcccagctactcgggaggctgaagcagaagaatcgcttaaatccgggaggtggagactgcagtgagccaagatggtgccattgcactctagcctgagagacagagcaagactccatctcagaaacaaaacaaaacaaaaacaaaaacaaaaaacaatcaacaacaaaaataaaggtggctgggtgcggtggctcacacctgtaatcccagcatttgggaggccgaggcgagcggatcacctgaggtcaggagttcgagaccagcctggccaacgtggtgaaaacccatctctactaaaaatacaaaaattagctgggtttgatggcaagtgcctgtaatcccagctacttgggagggtgaggcaggataattgcttgaacctgggaggtggaggttgcagcaagtggagattgtgccattatacttcagcctgggtgacagagcgaaactccgtctcaaaacaaataaatgaaggtacatctctgcttccttgtctcttgggccatcagtcacgtaggcactttgggcgaggcactgagcagcaccaagggcatcttccggcgtgttctgggaggcttccccatctccctgaaatgagtttatataatctcctagtaaaagtcaatgctgtttcgctgtgtgtttcatggagtttggttccctggccagctggtctgtgggaaccagagcagtttgtgcctagattcattgctgtctcttttctgggcgaccagcacgttatgtgattagatgggaatagatatgttttggtaaagggatccctgatttagttgcaaaaagccaagccattggctccctttgacctgttcttctggaaataacctcttcttgaggggtgggcaccaccttggtattacctacaccccagtgttcttgggccacagctttcttgcccatgaggtctgcagagctgccgtcctggtttctgaggaaggtgattttgttgatcagagttcagatggtgttctcccagatattcgaaaatggagggccttgtccatctcaaagcggtggttggggatgcaactgatgttgccagccaggcgttggggatcagccaaggcttttgataaagttggaagaacttcaagctcctttggaccaaccttccttccttccttcctttctttctctcttccctcctccctccctcccttccttccctctttccttcctttcctctttcctaaatagagacagggtctttctctgtccctcaggctggagggcagtggtgtacttatagctcactgcagcctcaaactcctgggctcagcgatccttgcacttcaggctccggagaagctggcactataggtgcataccaccatgcctggctaattttgttatttttaaaatttttttgtagagacagggtctttctatgttgcccatactggtctcgaacttctgggctcaagcaatcctgcctcagcctcccaaagtgctgggattataggcgtgagccactgcacccagccagatttttatttctgttcggggagagtggcttcctttcgtttctcctgtccagggtgtcattgcctatgccagcctgagtgtgtgggcctcctgtgggaatcgccacactgtcctgttagagcaaagcttgcagccaactcttgcccccagtgctgcaatgcaacgcagatattttttagctttgttttaaaaataatatggcagatggcgaagcaggacctgactctcgccttcgccctatgtcttttcgtctgctctttctccaccgagtcctgtccctcagcatttgctcctcctgttccttctacttccatcgctctgcattttcaccatttgtcttttagaagacatggtttaacattttttctaagttatataaataatataaaaatacatttctgaaagaatataaataatgcacaactatctagagtacaaaagacaagtgttccctcctagcgatcctgctgtgaagcgtttggtatatacccttccaggtattttttatgcatttgcatataggcaggcatatatatacacacacacatgcctaacgcacatctatttttaacacaaatgggataatttatactgttcagattgttttgagactttgcattcttcagtcatgaatatatgtcgacttcctcctctttcacactcttccaaatcttccccatccttcaaggtgtcattcattctttgagaaagcccctagtggcgctgtcaatagtgagttttggtaggtacgtttctaatgttctttaaattcctgtaatcctcttcccctctggaccgctcactttgtctaatcttatgttgttctttgtttattcattagttaattaattccgttgagctacactcagttatttggcccccaagaagtttgtcgtcggtggaagacacagacatactaaacataccttgccctggaggttcatgagggggtggtagatggcaggctgttgatgcacagtagttgaatgaaagaatgagcaatgagtaagaaatagaattctgtaggtatcaagtataatgatggcacaatggtggggttagttacctgctggggtatgtcatggaaggtttcaaagaggagacgtttgacttgagtttttaaggatgagttgaagttgatcaggaagatgggcctgttaggcagcgggaatggtggtatcaatcgacatggtttgctcacaatattctcattgctagtttcatggatgtatcctgtggcttctccatgagataatgaagttcttgaaagtgggagtgtcatttacactcctacctgcagacaggtatactggcacttattacataccaaatcctattccatgagctgtgcatgtagtagcaagcactgatgtaggttctcatgtctccattttagagatgacaagactaaggcacagataaggtaggcaatatccccaagtctccatgtccccatgattagtaggagatggagctgtaagtctctttttagagtcttcatgtcctcacctttatttctttacattttgtatttttaatttttttaagagacagtctcgctgtgttgcccagactggagtgcagtggtgcagtcatagctcgctgcagcctccgacttgtgggctcaagcagtcctcccacctcagcctcctgagtagctgggattacaggcatgcaccaccacacttggctaactcaaatttttatagagatggggtttcactatatggcccaggctggtctcaaactcctgggctcaagtgatcctcctgcctcggcctcccatagtgctgggattacaagtatatgagctgctatgcctggcccatatcctcatctttaaatgggtctaggaatgcccaccaaagagagttgtatgaggttttaaacagtaaatgcctctaaatcatccaaagtagggaataaaatatcagcttatatcataaacttggttaaaatagcactctcctgctttatttttcctcataatactaatgctacttggcatagagttgtttatttgctctctcctttgtccattttatgtatggctgtgtccccagcacctgatacagagtataaagcattggctgaatgcgtgaatcttagttcccgcttttcaccttagcatcctgactaccgatgccctgaacacacatggtgaatttggctgaaatgaagcattctgtgcctgccccacaaaccaccaagggactgtgggtttatttgtctcaagatggtcaacactgctgttttcacattttacttgctgtcaaatataaagagatatcatatgttgcccgcctctgattttcctgatgtctcaatttaagtggtttccaatttgggtatgaaattatccatcagtcacagagagaactggtgccttcagcagtggctgttggaataagccagggcttaactggggaagctaatggtggaggagcaagggctggctagcagaggtttggccctgctcctccaggtcccctctggaataccacttctccccactggatggtgggctgtgtctagcccattccccaagatccagtttggatgacacttcacctatttattcattggatgctaatagtgtcttccctacgccagggactgacctaggcatcagggatgcagagagcaggccttggtcactgtcccctggactcacacagtctgcagcctggtggaggagacaccatgtgagctgagctataatgactgaatccagtccctcaccagatgcagtaacctacaagtgtctgttgctcagaatgtctttattttgatcagtcacttccacagaggactgcccaaagagacgcctctgtccagctctcgggtctgtctgtgtggagtacgaggcgtgtagccctggtgatcgtagagtgatgttagatgtctcagggtcaggtgttgaataatatgggctctgcttgggaaggtgttccccttttccttttggccatgctggtgaggtctgaggttgatgctagcccggctttaactcttggagaccctgacaaagtgagtgtgggcctctgggtcatggtgccgtcggccactgggaagttccgagctctcagatgcggctgcagtagactccgctcagaaagtccagacgccttgaggccaaggctcacccccagatcagctgcaggagaatctcttcaatgggacctgggcacctctcactgttttgcatgattctgatgctcctgaggttgagaaccactaacacttaggatttaatgacatttggctttcatcagatccagttgccttctagtgatactggctttctgtttgctagagtgatacatactttcctttttaagtaaatgttataagtgaaaaaagatgaatggtgtaatcccaccccagggtcacttgagcccaggagctccagactagcctgggcaacatagtgagaccctgtcttaaaaaaaaatgcatggattgaaaaggcaacgttattcagcaacagtgcaagtgggaggcgagtgtagcaagaatcctggtggtgctttgtgatgcaccggggtttggggaacactcctctagattttatccatggattgcagttttagcccccattattttggcgcccatagactcattgggaatgatttgacattatgccaatgactcattaagtgcaaacagcagaaatagctaaatgaaacaatttagaaatagctaaaaggtacaatttagtgattgtatctttctctgtgtaacaaattgtcccaacactgagaggaaaaaggacatttggcagtgacagcatttaccatctcacagtttctgtgggcctggagtcctcgtgccactcagctggttctctctccagggtctctcccaggctgcaaccacagcctcagccggtgactgcagacacctcagggctctcctagggaaggatctgcgtccaagctaacccgtgtggttgttggcaggattcagtttcttacggactcttggactgagggcctcagttactctccagctgttgactggaggccaccctcggtttcttgcctatccaggcctcttcactgcggccaaagaaagcaaaagagagagaccaactaaatgggaatcagggtgttttgtagtctaagctttagaggtagcattctggccgggagcagtggctcacgcctgtaattctagcattttgggaggctaaggtgggggtgcatttgaggtcaggagttcgagaccagcctggccaacatggtgaagccccatctctactaaaaacacaaaaattagccaggcggtagttacacacgcctgtgatcccagctactcaggaggctgaggcaggagaatcacttgagcccgggaggcggaggttgcagtgagccaagatcgacccactacattccagtctgggtgacagagcgagactccgtctcaaaaaaaaaaaaaaaaaaaaagtggcattccatgatttctactatattctactctaatctgttcattaggacagaggcaagtcactagggccaagccacactcaggggattacccaggaggtgaggaccaggaaccggagccacggggtctgttttagaaggctgcacaccacaggaatatcactgaagacagcccccacgccacgtccctggcacctttactggccccccgggagcgagttgtcacaggctgaatgccaggtgaagccgagcaatcgctagttattttatggacgaagtgagtcttacaaccgtgtttgcactgtactttggtcacaaatcatctgagccaaaattactgcttccctgtaattgattatgtaggaatgattgattggtcgtattgaaaatctgtggcaggggccaggcatggtggctcatacctgtaatctcaacactttgggaggccgaggcaggtggatcatttgaggtcaggagtttgagactagtctggccaacatggagaaaccccatctctactaaaaatacaaaaattagctgggcatggcggctggcacctataatcccagctactcaggaggcggaggcagggagaattgcttgaacctgggaggcagaggttgcagtgagccgagatcgcaccactgcactccagcctgggcaacaaaccaagactctgtctcaaaaaaaaaaaaaaaaaaaaaagaacaattctatggcaggagtttctgcagactgactcaccctggcctcttcttcaataacgtactttgtttcccttctctttcctctgtctctttgccccgttctatcctacattgtatattgtctcacatgtctgtaatttcatgtcttgagggttggtttggggaacttggtttctgtgaattttactctgtcttggctgttggtttctgaggtccagaggtttttctggttctggggttttctaaccaggagaatgtgggcaaggcttccattgaaagccccaaatcagctggggtgaagacggggatcaaggacctgggaaagaatggccagactttctgtgttctccaggcctatacaagcctttctgctgcagtaactatgtggtttcaggcaaggagctttacgtctctgagcctcagttttcacagctgtaaaacagggtgtagtatattagtcaacgtaggttcagttgcactgcagtaagaatcccgtaatgtcctgaacagaaaacacatagatttctgtctctttcatgtcacttgtccttcgtgaagttggctgggccactgctctgtgttgtcaccatcctcacctgcagacccaggttgtggcagaggggcaggagacattggccaagcacattctgactcttaaagcttccacccagaaattacatgtcacatctctcttatttcaatggtaaagcaagttccacagacacatctaactgcaggtgggtggggaggggcagtctcccaggctcctggaaagagagagcatagttacttgtgagcggtcttgatcactcaacgggtaggttatgaggcttcaggcaggtaatagatgcagagatgtgtgcgcccggtacgtagtaggcaatcaacagatagtagtgctgatggtggttacggtggtgatgggaatgatgctgattagagaactaaagcttatctcgggcctgcagtttacaaaacctttgtcttcctgagccactcatttagcccatgtgtgttgagtttttcagtttcctgagttgtaggtactgtgctttgaactcaggatcaaagagaagactgccatggtctgtggccttaaatagcccacaatctctccttggcaacagggattgagggttttcctttgggttttcattttcaggccttggcatggttaggaaatcttacaaataaaataaatgctggagctggatgaggcctttgggatcatggtttttgtattaggatgattccagtggaagaaacagagaagccagtacaaactggcctctgcaaaacaaggaattttttatattagatactaagaaagtccagaggtaggtgagtgcctcattgtgttttgtgttgctgcaaaggaatgcctgacactgggtaatttatgaggaaaagttttatttggctcacgattctgatgactggaaagttcaagattgggtatctgcatctggtgagggtgtttccactcgtggcagcagaaggcagaggggagctggtatgtgcagagatcacatcgataagagtgaaagcaagagagtggggaggtgccaggttctttaaaacaaccagctcttggagaaataaatagaggccaggtgcggtggctcatgcctgtaatcccagcgctttaggaggctgaggcaggcggattacctgaggtcaggagttcaagaccagcctagccaatatggtgaaccttgtttctactaaaaatacaaaaattagccgggtgtggtgatgtgtgcctgtagtcccagctactcaagagggtgagtcaggagaatcatttgaacctgagaggtggaggttgcagtgagccgagagggctcggtccccagcacccaaacacctctcatgtggccccacttccaacattgggggatgaatttcaacatgaggtttggagggagcaggcatgccaaccatagcagcaagtgtcagcttcacggtgacccagagacctgggatatcatggaaacctggtacatttctgcctgactccgttctcactgctcccttccgctcccccagcccagtccgtctcccctcatggaaacagcagtcgctgcagtgttctcaggctgtttagactcaagagaaagagcaagtctctgcccagggttgccagcagaaacccccagattcactctgaaccatgttagttaattgacccatcctgaaccagttactacggccagaaggacaagatatgctgattgactgaagtcagttagtgctcacccttggatcacatctcttggaaggatggtttcccaacaggagagtggaggtgggggcagcagacagccatactccactcctgtttcctgccccttcttttcttccttttcttaaaaaaatagataatgaacttatttatttttgagacaaggtcttgctctttttctcaagcaggggtgtagtggtgagtccctgcagcctcaccctcctggggtaaaattatcctcccacttcaggctcctaaatagctgtgaccatgcctggctaattaaaaatttttttgtagagttgggggtctccgtatgttgcccaggttgatctttaactcctgggcttaagcgatctacctgccttggcctcctaaaagtattgggattacaggcgtgagccactattcccagccattttcctttctttagggaagaaattgaagctcagagcagggaaatgacttggctgctgccactcagcttgttagaagcagggcaggccatgggtccaggactgtgccctttagccactttgactcagttccaaaaacatcttctcaaagagtcatcagtttcaaaagggtattggggaagcagtgataaagggaggtgattataaaagggatgttaattgcactatgcctggcattttcaatgagcagaactttgttgtttattgcttattgacagaagagatgagaaatgaggctgatttctctctggcagggctgctgcttgggtttgatcactgtgagcaacaggtcagggctctaattgagggttttggtgattggcttcctaagtcatcgatcccggtgagtggggcctgcccagcagtgatgagactgttgtttagctgctgatgggaggcactggtgtgtgtgtttgggggcatgtgttaacttttccatatgaatatttctggaaggtacttttttggaattactgctaggcttcagtattgaatgtcacagagcaagttgtccaggaggcagattctggtatatgacctcttggtgtttgaagacagaactcctaagaattccctcttactttctgctgccaatgccctaatttcttaaccttgcagaatggaattatctggaagctgcaccagcacatgagaccccaggaagagtccttagctgacctaagggctgatcagaatgaccttggtctcggttccaggggttcagaaatgtaactggatcaggcagggtacgggcttagacaatctgaggttgaggaaggccacttacctgtccagactgttctcatctaccccccaacacccaaccacccacctannnnnnnnnnnnnnnnnnnnnnnnnnnnnnnnnnnnnnnnnnnnnnnnnnnnnnnnnnnnnnnnnnnnnnnnnnnnnnnnnnnnnnnnnnnnnnnnnnnnnnnnnnnnnnnnnnnnnnnnnnnnnnnnnnnnnnnnnnnnnnnnnnnnnnnnnnnnnnnnnnnnnnnnnnnnnnnnnnnnnnnnnnnnnnnnnnnnnnnnnnnnnnnnnnnnnnnnnnnnnnnnnnnnnnnnnnnnnnnnnnnnnnnnnnnnnnnnnnnnnnnnnnnnnnnnnnnnnnnnnnnnnnnnnnnnnnnnnnnnnnnnnnnnnnnnnnnnnnnnnnnnnnnnnnnnnnnnnnnnnnnnnnnnnnnnnnnnnnnnnnnnnnnnnnnnnnnnnnnnnnnnnnnnnnnnnnnnnnnnnnnnnnnnnnnnnnnnnnnnnnnnnnnnnnnnnnnnnnnnnnnnnnnnnnnnnnnnnnnnnnnnnnnnnnnnnnnnnnnnnnnnnnnnnnnnnnnnnnnnnnnnnnnnnnnnnnnnnnnnnnnnnnnnnnnnnnnnnnnnnnnnnnnnnnnnnnnnnnnnnnnnnnnnnnnnnnnnnnnnnnnnnnnnnnnnnnnnnnnnnnnnnnnnnnnnnnnnnnnnnnnnnnnnnnnnnnnnnnnnnnnnnnnnnnnnnnnnnnnnnnnnnnnnnnnnnnnnnnnnnnnnnnnnnnnnnnnnnnnnnnnnnnnnnnnnnnnnnnnnnnnnnnnnnnnnnnnnnnnnnnnnnnnnnnnnnnnnnnnnnnnnnnnnnnnnnnnnnnnnnnnnnnnnnnnnnnnnnnnnnnnnnnnnnnnnnnnnnnnnnnnnnnnnnnnnnnnnnnnnnnnnnnnnnnnnnnnnnnnnnnnnnnnnnnnnnnnnnnnnnnnnnnnnnnnnnnnnnnnnnnnnnnnnnnnnnnnnnnnnnnnnnnnnnnnnnnnnnnnnnnnnnnnnnnnnnnnnnnnnnnnnnnnnnnnnnnnnnnnnnnnnnnnnnnnnnnnnnnnnnnnnnnnnnnnnnnnnnnnnnnnnnnnnnnnnnnnnnnnnnnnnnnnnnnnnnnnnnnnnnnnnnnnnnnnnnnnnnnnnnnnnnnnnnnnnnnnnnnnnnnnnnnnnnnnnnnnnnnnnnnnnnnnnnnnnnnnnnnnnnnnnnnnnnnnnnnnnnnnnnnnnnnnnnnnnnnnnnnnnnnnnnnnnnnnnnnnnnnnnnnnnnnnnnnnnnnnnnnnnnnnnnnnnnnnnnnnnnnnnnnnnnnnnnnnnnnnnnnnnnnnnnnnnnnnnnnnnnnnnnnnnnnnnnnnnnnnnnnnnnnnnnnnnnnnnnnnnnnnnnnnnnnnnnnnnnnnnnnnnnnnnnnnnnnnnnnnnnnnnnnnnnnnnnnnnnnnnnnnnnnnnnnnnnnnnnnnnnnnnnnnnnnnnnnnnnnnnnnnnnnnnnnnnnnnnnnnnnnnnnnnnnnnnnnnnnnnnnnnnnnnnnnnnnnnnnnnnnnnnnnnnnnnnnnnnnnnnnnnnnnnnnnnnnnnnnnnnnnnnnnnnnnnnnnnnnnnnnnnnnnnnnnnnnnnnnnnnnnnnnnnnnnnnnnnnnnnnnnnnnnnnnnnnnnnnnnnnnnnnnnnnnnnnnnnnnnnnnnnnnnnnnnnnnnnnnnnnnnnnnnnnnnnnnnnnnnnnnnnnnnnnnnnnnnnnnnnnnnnnnnnnnnnnnnnnnnnnnnnnnnnnnnnnnnnnnnnnnnnnnnnnnnnnnnnnnnnnnnnnnnnnnnnnnnnnnnnnnnnnnnnnnnnnnnnnnnnnnnnnnnnnnnnnnnnnnnnnnnnnnnnnnnnnnnnnnnnnnnnnnnnnnnnnnnnnnnnnnnnnnnnnnnnnnnnnnnnnnnnnnnnnnnnnnnnnnnnnnnnnnnnnnnnnnnnnnnnnnnnnnnnnnnnnnnnnnnnnnnnnnnnnnnnnnnnnnnnnnnnnnnnnnnnnnnnnnnnnnnnnnnnnnnnnnnnnnnnnnnnnnnnnnnnnnnnnnnnnnnnnnnnnnnnnnnnnnnnnnnnnnnnnnnnnnnnnnnnnnnnnnnnnnnnnnnnnnnnnnnnnnnnnnnnnnnnnnnnnnnnnnnnnnnnnnnnnnnnnnnnnnnnnnnnnnnnnnnnnnnncacccccactcccgtcatccatctacccacccccacccacacatccggcatttctaagagctcatagagtagtggatacagttgtgcaaatgaatttagaaaatgatttgtacctaaagtcatcacgttcatcatgaggaatatgtcttcaagcagcttccaaaacccagccatctgaaatgaccacccctgccaatgaataacacccgggttccacatcaagggaggcagcaaccctatttgacccctacctctcattcattcaggaggtatttgccgagcgccatgaggacctgcgatagacgacaccaaactcaattttcattactccaccagcagggaagtcgtatttccctgttttctaactgagaaaagcgaaggttagagaggtcaggtgcttttgttaagatagcagagtcatggtgtgaaccttgctccgtcggaccccacagccatggtcttgtaagttgagttataacctagtgcgtggactctggagcccacactgcctgcttccagtcctcactgtgccacttagagccctgtgcccttgagcaagttaagtcaactctctgagtctatttccccatcagtaaaatgagaatgatcatgatatctactccttaggaggatgatgtatagaaaaatgcgtaacgcagggcctggtgctgagcatgcggttacctgatgttagctgccagtgttagtttcttagagctgctgtaaccaattaccataaacgtgctggcttaaaacaacatacgtttatttgctcgcagttctggaggccagagtcggcaatcacggtgccagcagtggcagggctgtgttccccctggaggctctaggggaagatccttccctgtctcttctagcctcgggtggctccaggcatcccttggtttatggccgtgtcacaccaatctctgcctttgtctttacttggccttctcctgcttctctctggtgcctctctgtatctctcttataaggacacctgccatgggatttagggcctacctggataatctaggatgttctcatctcaagagtctgaattacatctgcaaagacacctttttccacatttacaagtcacatttataggttctgaggcttaggatgtggacatatctttttggaggacaccgttcgacctactacagctgctattatttaaaaaattttttagaagatacaagtaatacatgaagacattctcaatataagcctttagacattaagttaagcatctctttggccatcgctgtcacctccattcccatcccctgaggtcaccattgtgatgagcttggagcttatccttccagaccttcctgttagggtggaaagatacatgcaatctttacatacagggattattgtcctgttgccaagcactgggataggtcttgggtattctgagataagacatagcattataagaatattatttaaaaaagcatcttaaacacttcactatatacattacagttcggtgaccaccgaattaacactgttaatagtgtagctgatgagtcactttcttttttttcttttttctttttgggacagagtctcgctctcttgcccaggctggagtgcagtggtgcgatcttggctcactacaacctctgcctcctgggttcaagcgattcttctgcctcagcctcccgagtagctgggattacaggcgcccaccaccacgcccaggtaatttttgtgtttttagtaaagacgggtttcaccacgttggccaggctggtctcgaattcctgaccttaggtgatctctccacctcagcctctcaaagtgctaggattacaggcgtgagccagcacgcccagcctgatgtaacattaaaaaaaaaagatacgtcaactttctttttttttttttttttttgctatcaaataccatatcttattcattcttgctattttttgtacccattagccatcccttcctccgccctcctccctccactacccttctcagcctctggtaactatcattctactctctgtctccatgagttcaattgttttcatttttagctcccacaaataagtgagaacatgagatgtttgtctttctgtgcttgttgtatttcacttaacatagtggcctccagttccatccatgttgttgcaaatgacaggctcttttcttattaatggctgaatagtaccccactgtgtatatgtaccacattttctatacccattcatctgttggtggacatttaggttgcttccaaatcttggttgttgcaaatagcactgcagtaaacgtgggagtgtggatctctcttcaatatactgattttctttctttcgggtatatacccagcagtgggattgctggatcatatggtagctctatttttagttttttgagaaacgtccaaattttctccacagtggttgtgtgaatttacattcccatcaacagtgtacaaggcttcccttttctccatatcctcgccagcatttgttactgcctgtcttttggattaaaaccatttgaactggggtgacacgatatctcattgtagttttgatctgcgtttctgtgatcagtgattggagcaccttttcatagacctgttagccatttgtatgtctacttttgagaaatgtcgtttcagatcttttgcctggtttttaattggattattagatttttttcttgttgagttgtttgagtttctgatatagtctgtttattaattccttgccagatgtgtagtttgcagatattttctcccattctgtgggttgtttcttcactttgctcattgttttctttgctgtgcagaagcttttgaacttgatgtgatcccatttgtccatttttgctttggttgcctgctggggtttaagtaactttcttagaaagtctgcatgacccacagacttctggggcagtaggaaataaacccatcatctccatgcagtgtaggcggtggtgtaatggacacatataaaaagtgctgtggaggccgggcatggtggctcctgcctataatcccagcactttgggaggccgaggcaggtggatcacctgaggtcaggagttcaagaccagcctgaccaacatggtgaaaccccatctccactaaaaatacaaaagtagctgggcatggcggcgcacgcctatagtactagctacttgggaggcagaggcaggagaatcgcttgaacccgggaggcagaggttgcaatgagcctgagatcgcgccactgcactccagcctggcaacaagagcgaaactccatctcaaaaaagaaaaaagaaaagttctgtggggacacgggagaagggattatcatttctaaagtctttgcttattgggggacacctgagccttgttggctttgaaagaataaaccttgacagacccacgtctggggacttgtggaaggaaagaacccggaagggatgttgcctgcagcaggaagtgaatcctgagacaacttgttcctagaggatcttgattgtcatcctcaaagagttggaatttttttcatggggcggtggaattcacattgtgtcccgcagggctctagggctctgagaagagaccaccaggccaaggcagggagaagtgaaggaaggaggaggccagcactcagggccctcacccggactgtgtccctgcagcctctgctctctgccaggtgacatttgcaggagctaatgagtggcttgagggggctgtagttacctcccaccctgtgtgcatcagctgtccccaaaccttcccaaataaacatgcaaacaaaggaaaagcgtgtgtgctctaggccacttagctatatcgacaactgacaataataggcatagagtgacagaaagacctgacgagatgccacttggcttcctttttcaagtaactctgtagggttttcccacataacagatacagaaagaatttattgttggaaaacggggcggcaagatggacaacattctctgggaccaacgggatgtgcagcctcctgggctcaggcctcaccagctcctgcacagtggtgggggtgaggactgagggacacatcacatctcctgggagcagaagacgatgtctgcgaacccagctcaatatgcatggccttgtccccaggcaggggcggcctcagctggccaggtgtccccgtcactgcagagttctggtcttagactggctgcacacggagactccagggcagcaaaacatcttctttcctcaccctcaggctctctgagccagcacctcctgatccagatccatttctgaactcctggatccaagaccaaggtcattctcatcaacccttaagccagtgaaagactcttcctggggcctcgtgtgctggtgcggcttccagataatgatagccaaggtcacacttgccgagagccctggtgattcaggcactcttcttagtactttatgcaaattatctcattgaatccttacaacaaacctctgagggagctggaattaccatattctttccatggaggaggaagcgaagggcagagaggtggagccacttgccctgctcacagagctaggaggaggcaattcgcaatgtgaactgggtggctgcgtctccctccacgctcttcactgctctgcccacctgttctcagtccactggccaaccagaatactgtcccagatagcaagtgtgacactgttgccaatagcagggttcttggtaagatgccattccagagaaggagtctgctaaaaaagaaaataataaaaaataaacctgcgactgcagggaatggaaaacacatggatgcatttttttaatgtgagatgaatctttcctgaacagttcaaagtgcctatgcctgctcactgttaataagaaaagagttgaagggtgaaaaattaaacaaaaaaaggccttcttttccagaagagagggaagaagaaataagagagagccacacctaggtcgggcgtggtgactcacgcctgtaatcccagcagtttgggaggccaaggcgggtggatcacttgaggtcaggaattcaagactagcctggctgacatggtgaaacctcatctgtactaaaaatagaaaaattagctgggcatggtggcatacgcctgtcatcccagctactctggaggccaaggcaggagaatcacttgaacctgggaggcagaggctgcagtgagccgagattgtgccactgtattccagcctgggcgacagagtgagactcagtctcattaaaaaaataaaaaaaaaagagagagccacacctagattcccattactgatccaaagaaaccaagttagcggttccattcctgctgcttctgcactgattgggagggaagcaggactgcggcagtcctccttgttcctcatcacacaaccgaatggtcctaggagaggccgagagagaaggctacagcttgctccggtgccccattcttcccagggctgcagtctactggtctacttgggatagcactcgagccttgggagagcaatgaggagaatcgttggcgtctcagaagtggagaacaggttcccatccaagctgagctgaggggacgatggctcaggtcagagctggctacactccccttgccatttgttatctttttagtgcagggatgtgaaagggaggggctggggtgggagggtgagaaaggccattttgttgagtgcttattattgtgcagccagcaggatgctgggcattttaaaataggatgtcgcaggcgtcgtggtgggtgagtactggctctgttttacagatgaggaaactgaggctcaagattttctgttaataagtgttgaggcccgagtctacttgaccttaagccatctgaccttaagacccttaaggtcttttccgggagaccttggtagccaaaactaatcagtgaagagcttcatgagaacattcttcccctacttccatgcctccatgcctgaagcagcctctgggatgtggcattctttcttgtgactggtggaaattaaactctaaggaagaaccctggaagaaacattccagagttgttttgcttttatctgcaaattagcagcaaacagagagcctcttcatccacagatttcatcattgtgcttataatgttaaaaatacactccatgcgtgtggttaacagcaaatggcccagtcatacacatgctcggattgccagagcatcttctcttccctttcgaggcaccgccttttgcacgtgccgagctttagggcttccttctttcggaggagatgagcccgaattctttttccgcacccatgtttcttctgggggagacagcaggtgttatagaaggagcacaacttgggattcagccaaagttggctttgaattattgctgtgtctgtgggcatgtcacttagcttctctgagcctctgtagaatacgggaaacaggttactcaaagaattacatgagtgggtacaaataaatgtctcagtccttaacgtcttgacattccttctctacctggagccaggggcctcttttgattctcaagcccttgacattttataaagctatggagatcaaagatttattcctccctacctagacaaatgagatttccctgaaattacaaatgatttttctgcatctttccagctatcagttaggaattggcaaacattttccgtaaatgcccacatagtacatgactgtgcgggtcacgctgtctctctcactgttactccactttgctgatgcagcctgaaagcggtcatagatgatacataactggctgagtgggactgtgttcccataaaacttcgtttacaaaaacgggctggatttggcccaggagccatagttgctgacccctgatgtagagtatggagaggtactgggtttaggtgctggaaatgcaaaaatgaatgagagtccttgacctggagggttctgcctgtaacacacttgcacgtagtgttggtaagggatattctatttgcaagaggacatttaaggtaacaggaaaggcaggtgcctttggttgttcttacaggctggtgtcactagaggatcaacccaggtgtatctaaatctgctcctgcctgcaagggtgagctcctcagacctgccgcttaaacatccttgatatctctcagtgctattaaatgctgctcagtggtcccaggccaatttttacatcatagttttccttgggattgtagcgtatcttaggaaatcctacatccactccccatgttactgtaacactagcgcgagccagttcagattctcggttttggacagctgcctttctttggcatcatctggttgacctgtgcctcagtttccctggctgttaaattggagttaaggatgaaatagtgcatgagaactgatatggattggctgtgtccccacccaaatttcatcttgaattgtagcccccaccattcccacatgttgtggaagggacctggtgggaaataatcgaatcacgggggcggtttcctcccatactgttctcatggtagtgattaagtctcatgagatctgagggttttataaggagtttccgctttcgcttggctctcattctcctgcctgccaccatgtaagatgtgacttgctcttccttgccttccaccgtgattgtgaggcctccctggccatgtggaactgtgagtccattaaacctctttcctttataattacctttattagcagtgtgagaacagattaatacaagaacatttgttccctgttttctaaacttaaaaaaaaaatcatgtttgtgtaaccctttaagaagaactcctccttagcaactcagtaggggtaatgggtcaaagtagaacctaccctcataggagaacacagggagggctctggccaatgagccttgaaacatctcctggaaaccctgggacctgggaggagaggctaaaaacaaccacagatgtagggcagagcaggagaagtctgcagcccagggacccagccactgtaaggctgctcattgactcttcaaaccttgtttccctcatctgaagcaggagcgagtttgggttagttgaatactttccactcattgcagtaggtctgagtgtttcaccaattggttgaaaattcataacttaagaatagttctatattggtagcttcagcctggaggaattctaggcagttgttgatttgtgcttttcttataggtgatccttaaaagtctgttgatataaagaggatggcagagagtttggcatgttaccccgtgcgtgcaattgaggggtgtgtgtgtgtgtgtgtgtgtgtgtgtgtgtatgtatatgtatatgtgtgcacgcacagcctcttggcagtttgcctcttgcctcccatctctgctctgcagccagagtgactgaagtgtgagctggaccagcctctctcttgcttaaatccctcataggtttcccccgtcggagcacagaccaaagccgtgctcatctcccttatgcttcaggctcctcccagatgcctcatccatccctgtcctccgtggacttttcacagccttaactgtctaatgaattgtgctgactgctgtgtggagactgtctctcctggtggattgtatgctctgcaagccccgggacttcctctccccctgtcacctgcagagagtctgactactcaatggaatgtagtgcaaatctgtggaataaacgtatgcataactagtgtgcatttgtggaatggagcagtcagcccctcattctgggcgagggctgccaaaccccaaaaccaccatgccctcagcgggttttccacagagcccagaatgtttctctgccaggtgctgggctgggatggttcttgcaggatcctattggagcttcctaacaaccccaccagggcagcttctgttgtccccattttccaggagggaagtaaggcccagagaagtggagtggcttattctcggccacgcagctgagtcagagctcaggcccagctgactcaagtcttgttcagtctttaaaaaaaaaaaaaaagaaaagaaaaaaacacttacttagaatgaggaaataaatcgcaacaaattgtctttatttattgtttcgagatggggtctcactctgtcaccatggctggggtgcagtggcgcaatcaggtctcactgcagcctctgcctcctgggatcaggcaatccttccacttcagccttaagagtagttgggactataggagcatgccaccacacccagctactttttaaatattctgttgagatggggtctccctgtgttgcccagactggccttagactcctgggcccaagcgatcctcctgcattggcctcctgaattactgggattacaagcatgagccaccatgcccagccttacaaattatcattgttaaagagctgatacataccacaaataccacagaatccagacaaacatcataggttaattaattaaccatcgggtactcttctctgatcccttttctcctacatttttaagctgcatactctgatagcctgttcagaagacagtactgttacatcattttctgtacagagagtagaaggataattcagtcgttcttccagcatggtggaacaaaaactttccaggattttgcttgaaattttaaaagcaattatatgaaagaattttacagtgaacacatgtatacctaccacttagagtctaccattaacattttgctgtactttatcatctgtttttttatccatccatctatgcgtgcatccatccatccattcattcattcatctgtccatcattttatcttttttgggatgcatttcatagtaaattgcagatgtcggtatatgtttctcccaaaatacttcagtaggcacatagaactttaccatcgccccagaatgtcccttcatgccatttcctggtgtttcccactccactctccctgaggtattcactgttctgattttctttccaccatagacatgatagtttctttctttcgatttaaaattgcgtgattgttacgttgattttttgaaaggttaacaagtcatgtacatggtaaaaatctacaaggtgtaaagttttacagataggaatagatcatcgtctctcctctgacgcttgcttctcagtgccttccctcaaaggcacccatggctagcaggttcttacgtgtctttatagaaatggttcatgcatatagacacgtgtgtctcccaacacgctaatacttcaagaggatagtagctcacctgacactttgttttgtgtctagcttttgtcatttgacattatatcttagagatctcctcctctttagaggagatgcctgctgttcttttcatagctgcgcagcctggctatgagtgtgctgtgttttatataaccatttcattccttgtttgcaggcttttattaccctaagtggtattgcaacaaatgtctttgtatccttgtctctgtgcttatgttgtccatcactctttatttcttggaaagaaagtagatgtccattcttagtgaagtagtaagttcgatcatttccccatgccctttgcctcccaccctttccctgctccagccattcatccatccatctgtccatttttacatctgcctgtctgtccatccagtgggaacattcactgagcgatcagatgtgcctgcctaccacgttggactctgagaatattgtcctctacacccttgttatcttttgggaaaaacaaatgtgtcaaaaactgattcacagaagtgtgatagtctatgtttgtgtgaggtttcagtgctgcccagaggataaaataaaaattctttaaagctcttatttgccaagtttttactcctagcaaagaatccttgacctcagctgtttttaaaaaccacagagaacaaaaacaacaacaaaagccacagagatatgatgcctctagtggtatgtttgtaaagcaaatgaaaaaactaacagagaaccctgaaagtgctccagaactggggggctttgtcctgaaggcgtggatagcccaggctgactttatgatcagatcatcaggcctgagcctgttgcttggcttgaccaaccaagctgagagacagaaccatgccatttcacattctgttccttattaaaagatgagatgagaaagcaagcgcattggtgggatggaaaacagttgtcattttttggcagtgaaaagggagagctaattgcataagggcaggctatttgaaaatagggatgagtgagaaagtgactctggaaaacaaattatggctgccatttcatgattggaacaaaggtttgctgcctccataggatcttccttgttgcttttctttggagcagtgaatctgagaacctggtaattagaagaaagaaataagattctctttctttggttctttttttgtctccaaactaacttatccttcccatgcatcaagattttgaatttgctacaaagcaatctaaaaatctgttggcatttcagggtggaaacatagcatatcttatgattcattcattcatgcatgcatgcatgcatgcattcattcattcattcattcagtgtgttagttcgtgcctacatgtgctgggttcttggccaggctgcagtgtgtcatggtgaacaggtgggtgtggtaagcacatatagagctctctgagctcacaaggagggttccaatccacagataaccagcgtggagtcattacaagctgaagaatgtgaaccgtagagggttacagtggagacactgtttagttctggtggtctgggaaggtgcctcctaggaattcatattttggctgagtcttagatgagaagagctaaccttacagagaggctgaggaagaggagaagggagcagtagcttacaataatacttgcttcgcagattgtttgaagattaactgtgagaccatgaagtccttggcacatagtaattgttcagcacatgctggcctctccctttacctttgttgattttttctaatagggcaatcagaggctggttgtcatgaggtaggcaaggaagaaaccaaggtttacggaagccaagtgacttctcacatcatcagaggaagcccaggattagaactcaaaacatgtgcatttctgtctgttcctgagagcttatgtacttggctcagagtctggaggctgacctgtgttcccagagatggaaaaggacctgggacttcctaggggcaaagcctcctaagtcttcctgcagcagcaacagcaaaataaaatcagaaaacccccaagctttaaggaggctcaaggttttagacccagttgtgcatctgtatatgtctactctggagctattgagtcctttcagattttcttcacccatcagaggtccgtttaccagctaaggctcttgagtatgaatttgggttacttgatcttctgggcatcccagaggcaagatgcgaagaacggatactttgtagtgggaggcagtatagcttagcagttagaagagcaggctctggagccagaccacctgtgtttgaattccacctatgctacttactacctgaaggaccttgggcaagttacttttatggattatatgtctctgtatgtgaaaccaccccaaaacttaatggctttttaaaaaaacttggctatttttttatctctcatgattctgtgggccgactgggctcagctgggtggttcttttacgtcatgtggtgtcgaccagggcttgactgagctggacatccaagatggtgctctcatttatctggtagttggtgctggctatccactgggacttcagatgggattattgatcagaatacctcatgtggcttctccacctggagaaagcccgagcacctgaaggcactgaggctgagtgagaggctgctgagtagactaagagatttggcttgggctcctgatatctttacttcctctgtgtttattcacagtgatctctcttgtccttgcccatgaaatcggaagcacacctctgcccacctgctgtggaagagctttgtggagtgggcagcctttgatgatactgggtggtggtggtgtcatgcttgcacacccctcaggactagaagtgagggtagctccaatgacagaagggttccctgttcatctttaccaccgccttacctgggggtgtggtaattttttttaccacaatgggaggaggtgtaatttttcttctacggctttggcaaattggctgattttctttttctctccctcttctgtctttcctttttatttaaataaacatttattcaggacatagtggatacttttcattctttttggcagaacctctagtgtcttcccaggtttgaggacttgccagtcaaagtggcagggtgggcctgtgtcagagttccacgctggcactggggtcagagtttcatgactagggagaagagacttcttgtctctgttctgtccctgctccccatctgccccaaacaacccaggaaatcctgagtcagaggagatgatggaaacttctttgctgatgcagcccagaagtggattccccgttggtctcatctaccatttcacatccttgtgtgtacagcaccgagggtgtttgctccagcatgattcaggaatcctggctgctctgttgctctagtaacgggctttgcctttccttgcacctgaagactgccgcgtgagtgcccagaccacaggcagagtgtgagctgccttctctgcagggtcagggagaggtgaatagagatagccatgttgctgatggctggtttgtgccccatattgagggtaaactaaagagaaatctgcatcccagggatgtgttctccaagattccccagacttcagacaaacaggggatgtttgtggccagtgtcagtagaaagttgatttttcttacaaaataatctctgctccacactctttattgccagaatataaaatagaatcagctctctaaagggctgctgtcaagtctagctaatatctggctccagtcttgaaagacagcaagaaaagacaaaatttgatgttgagtaagctcggcctttaattatcatcatgcatttgctacagtgcctggccttgttatcaagttatgttcctaacggaggttagaaagttcccaaattctttttcgaagcagcctccctggtactcatgtagacacacaaaatctccgggtttactgatcctaataatgccatgtaattagaagaaaagcctctaagtcagaaggattgaaccactcctgggtacgcatatcccctgttcaaaatgttccctgaaaatccccacccctcaggggaaacttacctacccaaaaaataccttgttccagaattagtcatttttgaagaagccctttgttttcgataattgtagagtaatgtctgtccttaaaaaatctgccttgtctttcaccttggtccttttggttgccttctgcctgtgctctgtggggtagatacagccagatgttcttgtgattgaggttcctgggtgcaaactctgttcacttccagttggaaatgaggctgcatctaaaggcggtggcgattgtgtgtagcagtggagctggtgtcctgatggcttgtgagtccccctctggtctgcccacttgatccccatagcgtgcccagaagagcttttcccagcctcagtgctgagtgggaaacccagaaaagaggagtggccaagagcagccctacagtgtctgccagagaagatactggcgtcctccacatggatgaaaagaggagaatgggtgttgtctagaacggggcgtggccttagaaccctttctttgcccttttccatccatgatgcgtaactgttaggaaggcaccatctctgacaccttgctttctggatttgagtgaaatgcatggagtgggatgaggtggaaagggtatttgattacttagtaatgtgatacacacttaaattgatatataatgtatctgcttatggttatgcagttaatacgtcttcattgtagaaagtacaaaaaagttcaaaatagaaaatacaaattctcttaactttctttatttttttgaaacagggtcatgctctgtcacccaggttaggtcactgcagccttgaactccaggactcaagtgatgctcccacgtcagcctctggagtaggtggaactacaggcttctgccgccatgcctggctaatgtttttttccattatttttaggagagacaaggtcttgctgtgttgcccaggctggtcttgaactcctgggctcaagcaatctgcccaccttgacctcccaaagtgctggagttacaggcatgagccgcttcacccagtctccactgttgatttaaggagagccttctaatgtgtcctaaccttcaagtttcttcatttcttcttgaagccttcaagactacttcagtctttcttttttcaccttttagctgacttttcctgtttgctgagggtttatagcagaaaagctttgaagttggacagatccatttcctagatgtgtgaccttgggcaagttttacagcctccctgagcctcggtttcctcatctgtaaagtggggagaatgatacctgtcctcaggttcactgtgaagcttgctggggattgtggggagtgtggaaaccctgagaggtaaaaggtgtaaattcagtgttctcttttttcacttcactacccctcacccttctctgttccacttggtttctcatagtcttgatcctccttcttaaaattttagccaatttagtttctagcagatcaaaaaaagaagctcattccctgggtatgagaaaaatatcaacatttattgaacatctaccactactgggcattttgttgtctgctttacataataattgcaatacttgtgacagctgtgagaatcagtttcctatctgacagggagctgaggataggtagcttactgggggtcacgtgcacctttgaatgcttgcttgccctcacccccacctccacagtgtggggtcaggacccctaagcagtactggtggtggggtccaccatgccacacagtttagtttctctcccctagtcatcatctcatgtggcccttctgagtcaggagaagccatattctgctgcctcaaattgctcgtacattatgaggggaaaggatggagcccttgtgggggtgacattggccttttgtgtttacctactgggtgtgtctgtgtgtgtgatgttcatcatggtaacaatggatattttttccattgcacatctgataacttgcatctcagatcctaattaggcctttatcgctccaaaattacatgctcttacatgcctgtgattatctcaataggattaacagtcccttggccataaagataattgagatccctcatggtggcatatttttattgctgcaacatcctctccaaccatccctccacacaatctcttaccgttttccagtgactgctttttcacttcattctgaataggaaatgttcagggatctctgagaggcagaattcttctgtgattatgcaaaccatggtaaccattatgcattttttctcccctctcccccttctcctgatggtaggtgcctggagatttgagtcaaacgtccgaagaccagagtttgtcggattttgaaatgtaagtccacagcctgtgctcacaaggggtcctttagaaactggactctgttgttggcttctgtcccagaagaccacagggggaaacagaaatcactgttgagacccacacaaggttgatgtggttcttgtagagctggtaggagtcgctctcctacagcctcagtctcgccctcagatgtgttttttctcacccttgggtatttaaaaacattttttttttttttggctgacatttagaatttggaagctatcacataacacaaatttcctttattttctttaaaaatgagacgcttgtccctgtgaggccacagtctgctggagctgagtaaaagctatcccctttgcacaggggcatgtgccgtccaattgaccacagttcccgctctttgctgttgcctggaagtgaccgacttcactcattttatgatctgtgtggcccctgggttattggaaacaacagtagtccatgccttggtcggatttttgattgggttcaattctatttggcacctctgctgagccacccatagggagagattagttggtcatcagacttttttatttttgagatagaatctctgtcgcccaggctggagtgcagtggcacgatctcggctcattgcaccctccgcctaccgggtttaagtgattctcctgcctcagccttccaagtagctgggattacaggcacacaccaccacgcctggctaatttttatattttttactagagatggggtttcttcctgttgaccaggctggtctcgaactcctgacctcaggtgatccacccacctcggcctcccaaagtgctgggattacagttgggagccaccgtgcccagccgatttttgttcaggatttcttgggctttggacaaatagatcccttaggctggtaaaggaaatggataagttgtctcctctctcattcatctctggcgagtttaaggttcagcacccgttgggaagaaaagcccgggaaaagtcccttttagagcaggcagggctgggccttggaaagagcatctcttcagaggcaggctggcctgcgttgaaatctcaggcatcagtccagccatttgacctcactgggcctcactttcctaatttgtgaggcgaaggtcctgatgcgaaccttgcagagcttgtggtggcgatgagtgagattatgaaaggcatgagggcatcacggggctattcatgttggggcagctgctggggtcgggggtggcggtggctgttaggctgatagggtggagaggctgaggtgggtgagaggtgaaggatgaaaatcaaaggtgaatttgcctgctgtgggcttgtgggcagggggagcatggcatgaagaggctcctggaacggcagagtccggcggagggcagctgtgggaagaaactgggaagacaagagagagccacagaggggagtcccagacacgaggctggaagcactcattattaaagcaagaattcacccatgtcctgctgcaggctggtgtccgggcaggtccctaatagagaggatgaattagccatggtccctgccctcaagtggtctctgcctgatccaggccacattgtctctccccagagatttggaacctcccccaaccagtttactcatctacactaaagccagaggcagcaatggcaccattcccctctcagcatggagactgaaatcctttgtggagcttacgaagaaggccctcactcacctctggcttcgttcccagcctttcccactcctctccctgcaccagccatcctggcagttccgctcctctaacccacttggtcctctccctttaggattattattttacccacttaaaccacttgtacacagcattgcctctgtgctggacactgttctaactcactcagtccctacaacaaccttcagagatgggtgtctcctcacggatgatgaaattgagccgggtttcaaacccaggcagtgctggtctagactcagtgctctccacaaatgcttattcccctgcctgaagcacctttctcatcctcaacttggccaactctaaatatcccttaaagcctggccgaaacattgcttcttcaaagaagccttctctggtgtcccagaccaaagcaggccctggaagtcactctccttagatccagtgttcctttgtggcacttacaataatagtaaataatttatctgtaacaactattggcatatatacacctgacaacaaagcttcagaacatgtgatgtaaaaaatcaacagaaatgaaaggagaaacaaacagctctacaataagacttgacttcagtacctcactttcatttatttatttatttatttagagacggagtcttgctctgtcacccaggttggagtgcagtggcactatctctgctcactgcaagctccgcctcctgggttcatgccattctcctgcttcagcctcccgagtagctgggattacaggtgcctgccaccacacccggctatgattttttttgtttgtattttttagtagagacagggtttcaccatgttagccaggatggtctcgatctcctgacctcgtgatccgcctacctcggcctcccaaagtgttgagattacaggcgtgagccacagcccccggcctcagtaccccacttttaataatggataggataactagacagatcagtaaggggttagaagatttgaacaacatgagaaaccaattagatttaacagcagaatgcacattcttctcaagtgcctgtaactttccaggaaagactgtatgttaggccacaaaaccagtctcaattaatttttaaaaattgaaatcatccaaagtatcttccttgaccacaatagagttaaatttttttttttttttttttttttgagatggagtctcactctgttgcccaggctggagtgcagtggtgtgaccttggctcactgcaacctctgcctccgggttcaagtgattctcctgcctcagcctcccaagtagctgggactacaggcgcgtgccaccatgcccagctaatttttgtatttttagtagagacagggtttcaccatcttggccaggctggtctcgaactcctgacctcagatgatccaccttcctcagcctcccaaagtgctgggattacaggtgtgagcccctgcacccagcccacaacagagtaaattttatggagatttgtctctctcccatgttaaaactgaatgctccagaagaaagggctgtctgcttcttttattgctctatctccagtacccagagtagtggcttctcagtaaaacttgtttaatgagtgagtgaaggaacaaaaggatgaacaaatgaactaacatctaggagggagatgggtcacttaaacaatcaatttctgatacagtgtggtcaatgcactgaaagagagaaccatttaacccaggctggggtaacctcgctctaaccctgggaggttgtccactcctcaccaatccagaaaagttaataaaaaccagagtgctacttatatttctgccttgtagcctgacacagaaatgaaaggagaatgttctaggcactaatacaatttcagggacctttccaggaggaaagtgattagatacacaaaccagttttgatggctcagaattgcaatgtacaaattgccttgagccctggggaagtgatcaatggggtttaatttacccctcaaaggaggtcagctcctctgctcagagatgagaagaaatgctatttcaggagagacccattacctgaagggttattgtcattgtgaaaatgaaatggtctttactctagaggttgtgagaacattgagtcgtggaatcttccatcaccggtgtctcaaattgtgttccaagcccagaaggctggcgagtttttatgagctgctcttgagagagaaggagagctcaggagaaagcatttagccctggaacagctctaattagaggcgaaggccgggaccttacagcccttccagaatggtgcagcaccgttttgataattattacaattgatcttgaagtttcagggacagtcagcttattcgctctgtgtaatttggatccagccgggtacaaatgtgacagtgacttacgagttaagtttaaagtcatcacagaagacaaaacaatcacataaccaaaatatctgttaaacatgcctcacctggcccacgcgaggtgagaaataaatgatttgaccataggtaaaagcatggagctgtgcgtggtaggtgctcagtaaattattttgcatttgaatttaaaccttggtgtattggacccatatacacagtgtttttggaaaagctgaaagagaggtatttgtacccatcagcctggttttctaacttgtcattttctctggtccctccctcctcccatcctaaacagctgtcacccttgttgccatgagtgttggtctcctgagctcgtttgtggagtctgatcttaaaatgggctcagggtcagggtctaaagtcagctcagtgaggaggcagcgtgactgctgggtgctccagaaacgctgggcattgctgtgtgtgacctcctgtgatcgcgtccttggggcttccggttattatcttcattttcagatgtggagactgaggttcagatacattatgggccagatcactccataagaactgaagggagctctttcacattccggagtacagattgtgtgtgtatgttgtgtgtgtgtgtgtgtgtgtgtgtgtgtgtgtgtgtgtgtgtgtgtgtagagagagacagactgagtgatgacttaaacttgtcctttagcttgccatcaggtgtgatgtaagttgtcataaattgcttgtgcataatacctcttggagtagaaaattgtctcctttcctcttttttattttttatttttttgtaagttaaaatgtctaatgttggtctctctctcttccttttggttagatcaaaccgggcgctgatcaacgtctggatcccctcagtgtttctccggggcaaagcagcaaatgcattccacgtgtatcaggtgagtgcctggttttcaggtggacatcacagctgggtggaaaaacgcccatttgtcatgctgtggtgctttttgcctcttggtggtggggcgctatgattaggaggctatggccttccagacacccacatcttaactgcccagaggccttgccgaagaagtctgtggctttcagttgggcagggggatacggtgggcctcttcgtgccagtcaggctcttagtgtggctgctgtggaatctcagctcagactgcatgagcagaaacggagatgtgtgtttgcttgttttgcatctgaaaagtccagtggtaggtcgggccttgggcatggctggacctgccatcaggaacctgctgccatatcctgtgtctgctgcttggtgaccctctcaggccagctgtccgtgggttgacaggatgaccccagcagcgccaggttctcagcctggaagggcgggtctcactggtgtgtcctggatcttgagcctcttcctacaccttggggttgggtgacggactctgtgactggcctgattcagctcatgtgaccaccactgtcgccagggtgggtgtttacctcacctgaccacatgtctgagagtggggaaaggagattccccaaatgagagccagagaattctttccaaaagaaggggcaatggatactggacaagcgggacctgtagacatcgcctctgcttccttggggtacggatagccgcacccaggtgggcattgagtgtctggggcagcgaaatgtgtgtctgcttaggaggtgattttacccaatcaaggggactccagttctccgtctcctctctgattttctgaagcctcttttagccctgcccacagctcgtctgcatgtctgtcttccttctcctcctctctcttaccacggactctgatttccaggctttggtgtgcccttgttctgggactgctttgttctcagtgctgagccccagctgcttcctgcttctcctgtctgcttgtgctaaaataattgtcgttaggttttgttttattccccatgagctctctgcaaacccttggattttgttgccatttttcttagtgagaaattgacttattgaagaaattttcttgtctattaagatatttttccccaaagagtggggtgttgaagaaaggacactgaacttgaaagcggaatccctggtttaaatcctgtgaccttagatgagtcttagtttcttcagctgtaaaatggagacagtaatctatcttgtaaaactgttttgagattagaaatacctggcctgcagtagacactctattcatttctcaccttcccaaatgaccgctgtgcttggtctcaggtctaagcataatatgcacatcttactggaaatcttagggacagatgagctagactttggcatgagaagtttgttttagtttgacaccttcagctgggcaacagtcataggagaatcttgagtgttcatgttgttcccagctccggtttaaagggagaattagatattatggattttcaaaaatcctcttctctttgtttctccttttgtcccccacaaacccaactttcttatttgacccttcaagttctgcattgtggtcatcagagagctggaaggtgcagcctggaggatgaaaaaagtacagcagacagctctattttagagcaaaattaaaacatgttatcacttgagaggtttccttgacctttcagttttgacttttccccctgtttaccccatgaagcaacttggcaatttttagctcctgaaagctatgaaatgagacggaccttagcaaatatgccgttgcctgggagattgtttccacagtggccactgtggcagtgaagccactctctccccgtcctttacggtgtgaagctctcatgggttcagccctgcttccagccagcctcaggcctggccgctctgcatcgctgggagcaacttcactccacgcctttggccttctgcagccttcctgatgctggggtgtgtgaagtggtgtctcttgcatgcaattatttttctctttttagcaaatgatgcttctgattggtgcctgcagagcaaaatcagagcatgtgtttggaagcattttagaaatcctttattgccatgtttttactttatataaatgatattgcatagaaggtgactcatttaaaatactggtactgttgaagagtacttattttagaattaaaaaagtatgctggccaagcatggtggctcacgcctgtaatcccagcactttgggaggctgaggcgggtggatcgcctgagatcagtagtttgagaccagcctggccaacatagtgaaaccccatctctactaaaaatacaaattagccaggcgtggtggtgggcgcctgtaatcccagctacttgggaggctgaggcaggagaacggcttgaacccaggaggcagagattgcagtgagccgagatcgcaccattgcactccagactgggtgacaagaatgagactctgcctcaaaaaaagaaaacaagtatgctatttaattccacaaaagatttgacataatttctagagaaacgtctaaaaaagaatgataaaagagaggttaaaaaaaatacatcagggtcaatgaaaatgtaaactaagggtttaaaaggaaaaagcggaaagcatatatatgtgtcatgagattctacacagttgcactcattgatttatgaatttcctgtgggcttcctggcagccattgtgaaagggaaatgtggttatttggataattctgttgctaatgataagaaaatatgttaattctttaaaagaagctgtaaaagaaatttccacacaggatttgagattaaacaataaaaaaggatagagtagacaatccccatctacattcccgtgacagccactgtctggttttcttaagatttcccttgaaggaaaccaagggcataaccccaaagtgaacataaattcgactggagagccaagacatgtagctttctcaggagagcggtgctccctggtactggagctgcgctgtctgtaccagagctcctagccatgtgtggctcttgagatttatattaattaaaatgagatttatatcaattaaaatggctcatgcctataatcccagcactttgggaggccgagatgggtggatcacttgaggtcaggagttcaagaccatcctggccaacatggtgaaaccccatctctactaaaaatacaaaaattagctgagcgttgctgttgcatgcctgtaatcccagctacttgggaggctgagacaggacaatcgcttgaacctgggaggcagaggttgcagtgagctgagatcgcgccactacactcaagcctgggcgacagagcgagactctgtctcaaaaagaaagaaagaaaatgaaagattcggctcctcagttgcaccacatttcacatgctgagcagccagacgtggctgatggctcctgttctggacagcacagatctggaacatttaccccacacacagaggtctgcagggcggctgccttggaacaagctctcctagcgtgtgggatggcaagatggtggtgtatgtgccaagtcaggatttagaaggaccacactggccatgaaaggccacatcctgcggggagaagggcccccgctttttcagcccttcatggcttccagctccttggaagaggaagtctctgtgtcactctcttacctctcatgtccctctgatctttcttaggaaaaacagcaaggctggggtcattgcctttggcaggtgacaagcttaaggttaattagattgttttttttttttctgtattcatttttacatttgcctcctagttatgtcacagaattctatttttccatttaccatggtgatgtacagtccccctttaaaatatattttaggtaaaaaggaaatgagtcagcttaaagaaagctactaaataaacaatcgtgaaaacagtccaaagtttagcatgatgctctatgaatgattgatatttgggtagcactataaaggaacagatagactgtgattaacaaataccagtataataattagtagccacctctcactggtttgtgtgttgtgtaatagctcattcaatccttgtagccatcctgtggggtaagaaactcttaccccattttataggtgaagaatcaaaggcacagagaagcatctcatttactgacatgtttttcagcccccaaagcagtctctgacaaggtcctggtctttagagattctgtgttactgaaggagggctgaatcaagctctttaaaaatcctaaaagcagctgtgcatgatggcatgtgcctgtagtcccagcagctccagaggctgagataggagaattgcttgagcccagcagtttgagcctgcagggagctacgattgcatctgtgaatagcccctgtatttcagcctacgcaacacagtgagaccctgtctctccaaaagaatgtaaaaattaactgggcatggtggtgcatacttacagtcccagctactggggaggctgaggcaggaggattgcctgagcccaggagtttgagattgcactgagctgttataatgccactgccactccggcctgggtggcagagcaggacccttctcaaaaaaacaaacaaacaaacaaaaaaaaaactagaagcagctgggacagtcaccctcattccaaaaggcaaggcccagctcaacgaagatctcacctgcatgggcagccacctacacccctgagatggtaggctaagggcaggcctgcagccaagccaggacttttccataggacctctctgggtccactgtggtgcacacattatccagcaagccctccacatccaagagccaggctgagatggtttgctttggaaagttgtcagagcagttgctggtccacaataacttctgtggccgtccagtatctcaggacatcttgtttgagcaatgtcagggtcccagaacctgcctcggggtggctgcttgaaaaagtcctccggccaggtgcagtggcccatgcctgtaatcccagcactttgggaagccaaggcgggtggatcacctgaggtcaggagttcaagaccagcctggtcaacatggtgaaaccccatctctactaaaaatacaaaaattagctgggcatggtggcacacgctgtaatcccagccactcgagaggctgaggcaggagactcacttaaacctgggaggcggaggttgcagtgagccaagattgcgccattgcactccagcctgggggacaggaacaaaacttctaaaggaaataaaatgtcatcctacatgccaaagaaattaaggtaattcccctgctatgtgcagtcacagagcccccactacttctattgtggaaaaatctggaattatatttggcacagaggattctagcaagaagtgctgtgcattgccaaggttgaatgcaaattattgcaaaaagtttgtgttcctgtgtcctgagagggagctgaggtgtgttatgccactgaaaataagaaatggcggcatttgactacttttcaggacaaagtaatatctggagagttcctgattttaagtttttcatccgtgagtacttcttacacggtaggctgtgctgatgcgtggctgctggcaggcactagccggagacaaaatgattaaggagtgtcaaataaaatggaaaacaaaattaaactcaatccagtaccttgttttgctgggtttttctctttctcttgttaacacacattttggtttgatttttctggcacttccatatgacagagttaaatttgttgttaattaatttctagtttatacctttgcagatgtttgatcttattccccaaattccctgactccaaacgggtttgagattcactgtctttttttttttttttttttttttttgagacggagtctcgctctgttacccaggctggagtgaagtggcgcaatcttggttcactgcaagctccacctcccgggttcatgccattctcctgcctcagcctcccgagtagctgggactacaggtgcctgtcaccacgcctggctaatttttttgtatttttagtagagacggtgtttcaccgtgttagccaggatggtctcaatgagattcactgtcttaatatcccactcaagtgtctctaaaggtatgttaggccttaaaaaagctcacctatttgttttcttcaactattacagccatcagattggtatgaagtaatacatcagtgtacttacctgagatcttaggtctttccctttgaaaaataccttcagtgtaagtacatttggaatcagtcttccatgtgggataaatttcagcctttgcgtctagcgaccacaaatgctggctgttgtacaatatttcatttgcgcaacagaaccgattagatcttctttgtaaagagggttgctttgtttcagcaaagcgttttttttgttgttgttttgttttgtttttttctgagagggagtctcgctctgtcacccaggctggagtgcagtagcgcaatctcggttcactgcaagctccacctcccgggttcaagtgattctcctgcctcagcctcctgagtagctgggagtacaggcacccatcaccacgcctggctaattttttgtagttttagtagagacagggtttcgctgtgttagccagggtggtcttgatcttctgacctcgtgatccacccgcctcgacctcccaaagtgctgggattataggtgtgagccactgcgcctggccgcgtttttttcttctagaataagttctgtttcctagaggccacagggtgttgtcttggcctgaggaatgttggtatcccaggaaaacttgttcagtatctgaactcttcccatctcccatcctgcagaacaaaatcacatagcctgagtggttattattattactttgttggagacagggtctcgctttgtcactcaggctggggtgcagtggcacaatcatggctcatttcagccttgaatttccaggtcaagcaatcctcctgcctcagcctcctaagtatctggaactgtaggcatgtaccacaatgcccatatttttgaagagacagggtctcactgtgctgcctaggctggtctgtaactcctggtctcaagtgatcttcccacttgggcctcccaaagtgctgggattacaggtgcaagccactgtgcctggcctctggggacttttaaaggtttaatccagctaagcatatttatatatgtaatgcagggaaagcgtattatttttatattaataatagatcacagcatcttggcaggctgcatgagcttcaggtggtttggaggatggtgatgtttttggacttcaggctttgcgtttctcagctcttccttttcatcctctcttaagatagcttaccccttgggccctcaagttctcttttacccacagctctgtctttatgcttgcttcctgtgtagctatgcagagagggaagaattcattaagtagagaaagatgaaatggttggaccgagtacagaaatgggaactgcagctgcagtgatgtgggctctgagaagcctctgccttagcagataccattccaaatttaggggagagaaggacccgttctaaggctgaagcatttctctcttgctcacacctggtccttcctgtcacacctgttgtataccaggtagacaggagagccggccgtggactgaggcagccgtttgctgtttgatttgtgagtttcatcccagccagtgtgggctcctgtgttgcaggccaagccagaccaggggagcacttgcccttgttcttgctgtgtctctccttgagagctttccaccccggcgttctgaggatcatagcacatgaacccctagctgttcctggaatgctcagggctcccaggaaagcctgatgtaggtgaaaacagaaagccaaaggcaaaatgctctccccttcctgctggacatatgtgtcactgctgtcctctttctgctttatctttccaaataggaagaatttttaaaatttcccttccagtataaagcctttattcgtcccaaagctgttgatcaagggtctgctatatgcccagcatgtgccaaacctgcagaaccagtgggagccaaacttgacattgagctgaccgtcaccagtctcactagtttagcaagaaggcaggctgtgtggggtaaaggtagcctcgctctgcagagaaaggaacaaggaggagggacgggacaccactcaccttgcagcatggatgtgaccgtgtgtgatgacatatgaaatgcttgggccatagctactctgtgaatgttacctttgtgatctgataaccacttgacttgtgataagcaattaagcctggaaggaaacggaaaaagattttccccttgttgaatcaaatgtctctgggcatgtccccgtgttcaaaaaaactgtatggagcatctccttcaccaagggctttacatgggctgcaaagagcaagacagcattttcctaaggtacctggcacctggtggggagacaggacctccatgaaagcaaccgaagttcaagggcggttacatgaggctttgcggaggggtgggagagccggccatcgggtaggacgccccagcctctgctgcagactgtttaatgcacattgctgcttaattcttacagcaacctatggggtaggcactgttttcatgatccccatcttatagatgaagcagctgtgactctgggttgaatgagtccctctgggtcatgcacaagatctgcctcatgcctctgtctgctccacgttgctcctcacccaaccaccaaggcgtgtgcttcacaaatttgtctcagtgaaatgaacctgtttccataacatgtttcctgaaaggaattctgtcactctctcattgacccatcactcattgtcacagctgccgtgggcagctgatactggtgacaaggtaatatttttcacacgggagagagcgctgcaaagacgagagtgtggaattgatgggtccctgggaatgtgacaagtctgttaaggtggagaccttttcagcctcatatgcataaagtcttcgcgtgttaggctttgaagaaaacttagagctcacctgtgtgtgcgtgcatacgtgtgcatgtgtttttgtgtgtgttttgaaaggtacattcagaattataattttttacttggaaagctaaagacatgggctttgtaaatagtctataggtagaggtggacacaccctcttggcaggtgaactgtctgaatttttatatttactttttatatgagaaaatcaaaagaagtgttttgcactagatcatactctcagtagcaaacagagtggaggaattggtgacactttctagccactcatgtttctgctgtgtctcagggctacctggctctctctccctttcctgactccttctgcgcccagaagtaacccatccggagagctacccagtgtgtttatcaggcaagggctggggaggttagagcatgttgtcacgtttgctcatcatggagattggcagcttttgttttgttttgtttctgttctgtggccacagttgtcactgagtatttggttttggttaggaagggagtgttgggcctgggcaaggttcatctcattagctaagttctaatggagaaggggaatgtgaaataatcattacaagtgtggggaatgtctcaaaacgggagataaaaacagtgaagggcatagccaggtcactcttgctgaagtggtgggatctcctaactgcaggcaaaatacgttagcagtaataactgtccttcctggaaatgaaagtgctggggaagagacaggtggcagagggtggggtacagggtggatatgggagcgaataacagggtcctgacttaccgaatggcagccagggtgcagtgatctctcagaagaggcctgaggctacagagaagggagccaggtgaggtggagacagcaggaaggatactgtggagaaggaagctgaggtgtgaacacagaggagtggctctgtgagaagtgacagggccctcgagacaatggcacctcggaagcaacgaagtgacgtgagtgttcagtggtacgctgctgtgcaggggagacagcttgttcatcctctctcctgttgagtcgtcttggaggtgggcagcatgttgagcatacgcaggcgctggacgatcctcacgccaggcgccctgccccgcacttcctgcatcagcctgtggctttgagagccgccttgctgagagtggccttactcacttaccgctcctaaatggtggtgtccattgttctaaatgaggcgggatgtaaattaccatacagtcatcccttgcttgtctgggggggattggttccgggaccccccatggacacccaaatctgagggtgctcaagtccctcatataaaatgccatagtatttgcatataacctaagtgcatcctcctgtagatgctaagtcatctctagattacttacaatacctagtacaatgcaaatatcatgtaaatatttgttacatggtattgcttagggaataatgacaagataaaagtgtgtgcatgttcagtagagatgcacttttttgagtatttgtaatctgtggtcggttgaatctgtggatgcagaacccactgatacggagggctgactgtattaaaaattaaaaatttgagccaggtgtggtggcttgtgcctgtaaacacagctactcagcagactgaggtaagagaattgcttgagcccaggagatcgaggctgcagtgagctatgatcacaccgctgcactccagcctgggtgacagcaagacctcaactctaaaagtacaagtaaaaaagtaagagaggtgtttggaaatcatcctcttttcaccaagtcatattaaccgtggcttaagtgggaccttctaagtgtggtctccatatcccatcttcacctccacggttacagaaacaaaaacatgaagaagaggaacttgctaagctactgatctgtgattcccccggtctctttccttttccaagttccctggttgtagccagctggtcttttctgctccctcacctgaagggagatttctggtaaaagtagaagtcctgcaaagacattttcctgcctggccgttgtttttcaaaagcttgggacgattttgtttgtttatttgttggtatgtatgtatgtatgtatttagagacagactctgtgtctccaaggctggagtggagtggcacactcttggcttatagcaaccttcgcctccggggttcaagcaattctcccacctgagccttctgagtagctgggattacgtgtgcccaccagcatgcccggctaattttttgtgtttttagtagagatggggtttcaccatgttggctaggctggtctcgaactcctaacctcaaatgatccacctgcctcagcctcccaaagtgctggaattacaggcatgagccactgcacccggcctgttgtctttttaaagagactcctttgagaagacagctaggggctaagggctccatggcaggccccagaacaagagagacctcccagggaggcaaggctccaagtccgggcaaaaattccagcttgcttgtgtgccctgggagcagaaaaccaggacccacaaactggcagtgagtgggccactgtctgcaggttggaagtcctttctgcaaggtataagcgctgtacaagcgccacactgtcctgaaggctggggagtgggcaggaccccaataatggctgagacagccttgctgcccactcggcaggattgccttggagtcttgatcaagatgcactcagcagctccttctggcaccattgagtttcatactcacacacagcatttctgatgtatttggatgaggccttgtaattacacagcaaggacaggttgtccatttgccctcacctactgcctggacagagtataaacttaaaaaactttctaaaatgaattaatccacccatgaagttctcctcgcaggcaggttggtattgatgtcttggggtcctgcactatgccaggcccagcgtctgcctccgtcagaccttccatcccacctgatgattggggctggtctaggatgttacctcccacatccaggggaggaagtgaggcctggtgagcggacttggtcaggctgacaggtagatggactctcctccccagcgggtctccatggggaacagttggcacctgccctgaactgccacaccacacactccctgtgctccccaacccaggctgggaatgcccactctctcctatatccaaaatagttatatttatttttagggatgttggaaagggatgcctcttaaaccccatctcccctggggagatcatcttgtcgggaagaaatggcaggacctcttccctgtacagctcgtcctgggagcattgttggagtgggggccgtcttctgaatgtggccagggccgtactgtcagacacatgcatctgcctcagttaaacaggctctgaggatggccgcctggcttgtcctctggtttgaaaaagacaactacagcccctttgcatcagcctgtaggaggtaaggaacccagaactgggcaggctgtgctctgttcggtttctgaccccagagactgctcatgggccctcctccttaaacgtcgagtccctctcagcttttcttaaactgcccctcaaatgcacttagcacagacgcaagcagagccccggggcttgtctcggggcaccgcccagtcactcattggtcattgcagagtcacagttagacaggaggaagaagttctggtgatctgttgcgcagcagggtgactatggttaacaatgacgtatatttcaaaatagctggaagagagggttctgaatgtttccaccacaaagaaatgagaagtatttgaggtgatggatctgctcattaccctgatttgattacaaaacagatacatgtagcaaaacaccacatcatgcccctgagttcgtttgttttgtgtggctgtgaaggaacacctgacgctgggtagttgataaagagaagaggtttctttggctcccagttctgcaggctgtacaagaagcatggtgtcagcatctgctcggcttctgggaaggccttggaggcttttagtcatggtggaaggtgcagggggagcaggcatgtcacatggcaagagaaggagcaagagagaggaggaggtgttactctatcccaaccaccagccctcacatggactaacagaacaagaagtcactcattctcatgggcagggcaccaagccattcatgaggcatctgccccatgccccagacacctcccactaggcccacctccagcttcaggggtgacattgcaacatgatttggaggggacaaacatatcaaccccataactgtgtataattattatgtgccaattaaaagtaaaacaaaactgaacatttatggagcccctgctgtgtgccaggcactgcgcctagtgagatacgcttgagtaaggggaagggcctcccaggtgcagccagggtgccagccacctcaggcacagtacttcttgggagcctaccattccatgagacaatcaggggcggtttgcattctactccataatccatccgtatcttactgtttatgaaacttgcatttccctcaggctagtctgcagtgaaaatgctttgtgtttcttctgcgtagccaggctgtgtgtacctcttggcacactgggcttcctgtgttcagcatctagagtgctctggttccagaagtgagcttccatggaagccgcctctgtccaggtgtctttccttgtttcaggctgtctggctcacctggtctcccagcatctgtctatgagggccaggggcaatgaggacattcctgtggcacatcagggagggagatgagctagtgggtcagagggggtgggtggttctcctttccttccttctctttgctccccgctttgcacactctacatccctcccctggtcttttccttttctctttctgtttccctctttcctcctccttctcattccttttccctattcctcatcattccttttccctgttccttgtcattccttttccctgtcatttccctcttcccttcctcctcttactgcctctctcctgttctgtgtcctctcttctctttcctctcttctctttccttcctcccacttcttgtctcctcaccctcctcaccctttcccttcccctttccttctttctctttgttccttcttagtccttgatgtggagaggaaattcataatttcctgcctctccctgtttttcttgagccctgggaagagaagcgctgtatgccgacagcgagtgagctttctctgcctgcagtaattggatggcttcttggtactccgcactgtctgtctttggccgcagcattgagtctctgagctcctgggaaggggaagggaatagataaagccgcagggcacgtttttctctgggaaccacatgcaaatgcatgtgggatttgtcttacattggaggattcccacgtgtcgggaaagtgcttccctgacatgactaccgagtcactcctgatagtattcacccagaacttttaatgaccaattattgttgtagtacagatttaaaattgatgttaattggctggtgatatttcatatttaagacagccttaactctaaataccacttttcaccaattgccgcaaaaccgtttgctagcgtccttcctccagattaacctgatcaggagagaaaacagtctggagccacaacacacatcagatgtaggatgttcatgttgacgatgaggattgtatttattttttttttgctagaaagctgtttttctagtggagtgggtgagaaggagaaagggacctgttcagtctggctgtggtcttagggtttctgggcatggtgtggtcatttgcaccagtttctgtccttctgtgtttctgggttttcttttcttttttttttgagatggagtctcactctgttgtccaggctggagtgcggtggcacgatcttggctcactgcaacctccacctcccggattcaagtgattctcctgcctcagccttctgagtagctgggattacaggtgcctgccaccgtgcccagctaatttttgtatttttagtagagacggggttttgccctgttggttaggctggtctcgacctcctaacctcaagtgatccacccaccttggcctcccaaagtgctgggattacagatgtgagccacagcacctggccatgtttccaagttttcttcacatgcctggtgtcagttcccatcttgcagtttcctacacagtcagcccagaagtccccttctccatgaagctttctctccttgccaggagcggcagttatacatctgcctaaacctgtctgatgcctcccttgctagactgagtggaaagaaggggctgctggcttgtagtgggcagggccgggggtgctgctcaacatcctacagtgcacaggacatccctccacaacagagaatatcctatcccaaaatgtctacagcgccaccgttgagaaacccttgtctctagtcaacagtgtaagcattgtttagttccgatgtttctccctgtccttgtgcttgattctttgtaggcaggtttatgtgaggagctgcatcttggtccgagggctggtggtaggggttgaatctgtgcctgcccagatacttgtgtgacagcatcctctcaatgcagccatctcctcagcaggacccggcctgcccctgtaatgtgattcctgttcctatttaaggcagggctcctccaatggggacagtgtgggagacagctgaccacctcattcttctcatcaagacactcattccccattgacacttgcacgctcttggttgcgggaggaggaaatccagctcagattgacaggaaacagatgacattcattgacttgcctgatggaaaagaccaagggtacagcttgaattttaggggcttagtgtcatcagactcagcccccccccccatctttctgtcgatttgcgttgctctgtgttggctgtgttcacgcccaggctgtggtggcaggggtggtgggttgcagctccaggcctgcatcgtcttggaaatgtccatgctgcccccaggggaaaggcccctgtttcttctgaggctgacaacagtcctggaagtgactgtctttgactctcaatggtctaggccataccacgtgtctgctgaccccagtgcctgggtaggtgtgatactgggtcggtgtcgtgtacctactcctaaagccataggtcggtgggagaaagatgttttccccaaaagaaaatgagggtgctctgactagcagaagggagatggtgtttaactggccaaaatcagcacacgtccactgaagcctgcaggctgcccacagctcaggctcggcttagggccagtttggtgaaatatgtgcatctccacaccagggttttttaactgcagcacagctgacattttgggccaggtaattctgggttacaaggggtcccctgtgcattatgggatgttgaacagcctcctggcctctacccagcagcagccacatccactccctagttgtgacaagctaagatgtctccagcattgacacatgtcacctgggaggcaaaactgccttcttgcgaagtttcacattaatacttactgatgaatagacaactgaaatgaataaagaaatgaatgagttgatagcccattatttccaatatttcacagaatcgaagacaccgtcaagtgttagacccatcctgatttcagagatgtcacatgtgaagataatgcctgtctcagaatcagtaaaatcagggtgtttcatcttctcttccagaggcctgggaggtgagggtggtgggaagcccgtgggtctgctggaggaatcaaacctctgcagtgaggcacatcctggtgttggcaagtgtttgacatggattctcaagatggagtatggtgttgagtcgactgaaacccgagttcacacctgtatgtgctgtgaagtttcttaacatctctgcatgtcagtttctgtctccatacaaggagataatcatagcactgacctcacagagttgatataaggattaaatgagatgatagaggtaaagccacttagtaggactggcccctactgagtactcagtcaaggtgagatgagatgaagaggcagcctcagggaaatgatggacgcatgagtcaccaagctcatgcttcagggtgaacactgatagtctcgcccacaaggccccatgtccgccctgggggaagtgatgagcgagggaaggagggagccaccagcgctgctgagagcaccaccttcttgtctcctccgcagtttgacagcaagatgggaacacagatgagataatgcctgttagtcctgtgtactaggtgctatgcggggtactttttctgcgatacctcacttaatcctcatgccagcccgagacatgaggtggtcagtagctgcattttacagataaggaaactacggcacaggaaggttaagtgccttgcctaaggtcatagctgggaaataatagagctgggctttgcactctgatccacaatctttcgaaacccaaggtgttgaaaacacagactgagaagccaagccagcagccactgctttattcttcatgctaagagttagaagccaaaagtaatggaggctactcctaagagccaaggaggtggaaattcagagtaggctgctctgccctttaacaagtccagacaaagatttagccagggagagagtaaaaaccaaggtctcaaaggaggtttggagaccaaatggggcttcagttccccaggctctgccaggcccttgaccatgaatacttaaaagccagctgtgttgtaaacagtggaaatattcctagatctttcttgatttgatttcccttaacacatatagggtgttcaaggaaaacactggcctcttactctgtaactgcagccgtaactagaattttcctatcagagtgctgttagatttaaggaggtaaagaatggagagaacttgacgcaatgtctgacacatgggaagttcttaggaaacattatagctgctgccactgctgtcatcaaccatgatcaccattgtcatcattagttcccctcctccttcctcctcaatcagaagcatcaccatcattatcatcatcaccatcattaccagttatcatcatcatcaccaaccatcaccattattaaccatccatcaccatcactagccatgcatcaccatcaccagccatccatcaccatcaccagccgtccatcaccatcaccagccgtccatcaccatcaccagccgtccatcaccatcatcatccgtccatcatccatcaccatcatcaaccacccatcacaggcatcatctatccatcaccatcatcagccatccatccctttcatcgtcagccatccatagcatcatcacctatcatccatatcctcaccatcatcaaacattgtcatcaacagtatttcatcttctctctcctttcttagggaaactcatttaagaaagaggcagcatttttctccttaaaaacatacagctggcaggctgtctagacctaggtttgcagcttcctctgccactcaatggctgtgtgaccttgggaaggttattgcacctgttgggcctcaggttacccatctgcaaacagagatgaaaatacctcccctcatgaggtggcagagaggaatcagagctgtaatatgaaaggctcagtaaatagccatgcttcctgttaccacagcccttgtgtatctgtttcccctggtgtttttaattaatgcaaaattaggcggggtggggcagacttggtaacataactgttacttcgacagtctagcaagtaacttcttccaaatcccctgctgcaaaaagcagcttgtttccctctcagcttcttctggcaagtgagatgcttgaactttgcttccctcctcgtcttccctgggctccttgtcccaacacccacctcctgttgtctgggccaagtcagtccagcagcagagttgagattcctcgtcccatctccactgtcccatgctctcaaggttataataccatcctcagggacttcctgagaacccaatcagcaaactacactttcacacacctctctctcccagcccctgagaagaggcctccacatggccgccagctcagctgcttccttcagcccccgacagagcagtctgacaatttcacttttgtgaagcctggcatggagctgggattcacagtctctcaggatgaggctgctggtggtgtacggagataggctttaaaggttggactggaaatgcatttctgtatctggaacaggtaggaaagaaacatccgaagcttaaaggaacagccccaccctgtctacttcattataagactcaggcttctcaaagcccagctcaggaagaaacaaacacacacacaaaaacccagcctcatagtgtcatgcagcagttgaggtgaatacgaggtgataccaagccttcatgctacaggcacaatgcaagttccaaagatggaccctcggctcgctaaagccaggagaagcatttactcaccaatgcatggggttgttttttttttttaaacacagaaataaaatgcttattattcccatgccgcaggccctgggaaaacattcatcacataaacgtagatcataagagctgatgactgaacagctgcctgatggctcacagaccgtctctacccactgcctcccgtcaacctcaggatgaacatcgggcatgagcaatggcatcacttccagatgaggaagctgcagccggcatcactcagctcagagcctcccctccagctcagggctttggggctcaggcaaaccctacgagcacagagggacaggcagataactgtatccaaatgtgaaacctttggaacgaaggctggggtaacaggtgccaagtgcatttgggacatgcttttttttcttcttcttcttctcgagatggagtctggctctgtcgcccaggctggagtgcagtggcgccatcttggctcactgcaaactctgcctcccgtgttcaaaccattctcctgtctcagcctcccgaatagctggggttacaggcgcgcaccaccaagcctggctaagtttttgtatttttaatagagatggggtttcgctatgttggccaggctggtcttgaattcctgacctgaagtgatccaccagcctcagcttcccaaagtgttgggattacaggcgtgagctaccgtgcccagcctacaagtttttgtaagaagagtgcatgtcagggcctgtggccaaaaggtgatactgttgaggtggacaaggggcctggtgtcggggatagtcctgtttctcaccagagagtgtgaggtccatgaagtgaagttctaagcatattctgagctggttggccagagggaatcagggctactggcagccttagctttgcacatgtctacgttagagcctcagaggcgtgatcagaaagatttagttttaagaggatgactttgtacttttcagatttcagaagccaatttctcttcccaggtagcagtgcagcgactttctcttgtcgatctctatcacgggtaaaatgaagagcccttcaagagcagagtgtgggtctgtctagggtgtggccattgcccaaggccagagtctttgaccaggaggccccatggtcagtttctgttcttttccttgcataagagttttgattttgctgtttcttttctcttccactgcatactttatatggaaaattgaagagataattgaatagggaggttttatctcttgaatgtgctaatatcatggagatgataatattctgtcttagggcccttccttgggcgactagaaccatggtaagcaacctgctttgagagagctggagactgctggtacctgcaaattattactaattacatctaaaaatctttattagcagtaagaggcagaaatagcttcagagcctaggggcttaattaaatgtgaaatatgcaggagagaagtagcttatgaagcaagcaggaatcaggctattatttattttgattgttgaaatagaccttgttgttccgagtggagttctatctggggggatacctgtaacagacagtatcttctcctccgtctctcccctctctataccttccttccctcagttattatggatcagacactgtgttaaggattaggttatagtaatgagagagtagactagcttcttgtcatcatggaattacagtctgtagtgaggagaaaattaatactaatcaaccacatcaataaatggaggataaccctaacatgcccgtccatagacaaatggataaataaattggggtacattcacacagtggaaccttgggctgcaaggagattaaagatgtgtaactacaggcaacagtatggctggatctcataaacaatgttgagtgaaagaaactaggtacaaaaagatacaaacaaaacacacccaggtgattgcattaatctaaacgcaaaagcgggtgagaccgatctgtgctcttggaggttgtcctctgggggtatggtgcagctcggctgatgtgggtcacttaggttttcagtgctcagggtgaaagtgaggggtcaggagagagcagaaagctggatcaccccgcacatgctaagaaaccaggatggcaacgtggatgtggcgggttaagcaaattgaaactgtggataatcattagctcaacagatgccataagatcagagtgcccctgaggcctctggtctctggatgatgcccatgtatttatcacttagtcaccggagcacagatcttagaaggaggcccaggagccctggctgcacacgtaattccattgcacgctgattcagtttggtcaagtccacactacccaaatgaccagagttaaaaaaaaaaaaaaataaaaaaaataaaaagagggaatagaaaacagaggcagggtgggaagtagagaagaggcagatagagacaaggggaaaaaaatccaacacggatggacagacgtatctggtttaaatcccagggcagcctgggccagttctactcaaatagagtgtgtcctggagtttgcacagatgatttgggcggccagggtctgctcttccccagccaggaattcatttctgaattcctctcggaattcctctcctattgtgagcatcttgtgctgagagctacatgttttttcatgctgcttttttctacccttgggcactgttgacagaaataaccatttctgctgtacccacaaaacttggtgtgttttctgcagggctaacctggactctcttgcaggcagacagaaccatcacccagccacagcctgccaagaccttcagggataggccttgggcattggccagagaccttttaaaattattttataggagtactaaaggcttactgggacaaaaaaaatatttggttttttagttatcttattttttttttttaaaaagatacagtactgttttaatactttggtatatcaggtagcttgggctaagttatactgttgtgacaaacagtcctcaaaccttggcagcttacaacagtaagtttattattcatctgtttcccactcatgccacacatccatcatgggtcagctgtggcctgtgctcacgctgtctctatgccaggatccaggaagaagcaacagcctttagccggggcttgcagctctcctggcaggggggtaagagacagtggcaggccttgctctgatcctgaaagcttctgctcagaagtgacacgtcactccctcaaaacacatggtcaggcctgaagataatgagccggaaagtataatcctctcacagggaggagccctgcaggagggtaatgggaacatctggtagaatagaaatataatgtgccttcacaagtaatactcactatagaaaaccccaggaaggatagatatgtgttacgtagccaataaaaatggtgatgtagatctaatttttaaaattctttttaaggtgaattttatggtatgtgaattgtatctcaatttttaaaaattatttatttttttgagacagaatctcactctgtcgcccaggctggagtgcagtggcgcgatctcagctcactgcagcctctgcctcccgggttcaagcgattcttgtgccttggctacctatgtagctgggattacaggtgcatgctaccatgcccagctaatttttgtatttttagtagagatggggttttgccatgttgaccaggctggtcttgaacttgtgacctcaagtgatccacctgcctcggcctcccaaagtgctgggattacagggcccgagccaccatgcctggccagtattgtagatctaatatgtcagcttggaaagctatttattatatatgccagaatgggggagggagaagcaggtaacaaaagagaatggatagtttaggctcatttttaaaaattataattaaaatgtatatattagcataggaaaagacatggaaagatctaggccagatgtagcaccccttggggtctgcagagcctagctgggaaatgactcaaggtggtttcttctcggtgccaaccctctgtcaccatgcagggtttcagactctgtgttccctcatcttccaggtttgtttgtcgttgctgttgtttttttttgtgatgaaaatcttgatttcaatgttaaaacctcttatttttaaatgttggcaaccaattagatgttttaacctgcgtgaattaccagtttgccacctctgataggaaccaacaatggctttctctgggtagtgagattttgtatgttttgtttttcttttttttatttatctgtattttctcagtttaccttgaagccaggtatttccttttgacaaatagtaattggggaactgataaaagaaaaaaaatactttaggtataggaattgctcttgactttgtaattctctattcggttgttggtatttaatcaaacaacagtgacccaaagcatcggccatgcttggaggttaataaaacggccagagacaatgcctgtgccaggacaggctgaaccccaagaggaagtcacagtgggaagagggtgcagagcgcccttgatgtcttgctgaccttgaacatcaggattctctatgttggcttctgttgacacagagccctgatgtgtcttcttgaaaatgaccccatgactgggaagatgccagctgacttggtgggagaaaggagaaaccttctgagggcaagttcccagagcagttgctaaataagatcagacaaagcacttaaactccaatttagcagttacccgaagcacagctccctgcagcagcttcatttgccaaatgtgccttttgcctttaaagacacaggagattgcatgaagcagagaaagataatttgttggatataaatgtgaatgtaagagtaggccttagattcaatacacactgttgaatattcagggttttattttattttatttttcccccaactgtaattccctgcctcatcacccatcatgcaaatgtgattcttagacattttctaatgttactctttccctaaacaagtaatcaaaacagggctttaagctgcatttggactgcaaataagtttagtataaaatgtaattattctccttaaaaaatcaacagagacaatttggacattggaatggcttgaattatccttaaacagaactcagggtggtgtccattccaaagattaaaataaggtaagaccagtcttagctggtagtagccagtttcttaaaaaataaataaataaataactttaaaaaatgctaaaagtagtacatcttctttatagaaaattcagaaaataaagttagaaagaaggaaaacaaaggactcacatagatacagttgcaattaatatctccttctagttaatcccaccacacagatatgattgcaattaatatctcctcctagttagtcccaatacatagatatttgattgcaatttatatctcctagttaatcccaatacatagatatttgattgcaattaatatctccttctagttagtcccaccacacagatacgattgcaattaatatctctttctagttaatcacaccacatagatactattgcaattaatatctcctcctagttagcccaatacatagatacgatggcaattattattatctccttctagttaattccaacacataatatatgagtgcaattaatatttccttctagttagtctcaccacacagatacgattgcaattaatatctcctagttaatcccaacacacagatacgattgcaactaatatctcctagttaattacaacacacagatacgattgcgattaatagttctttctagttagtcccaacacatagatacgattgcaattaatatctcctagttaatcccaacacacagatacgattgcaactaatatctcctagttaattacaacacacagatacgattgcgattaatagctctttctagttagtcccaacacatagatacgattgcaattaatatctcttcctagttagtcccaccacacagatatgattgcaagtaatatctccttctagttagtaacaacacacagatatgattacaattaatatctccttctagttagtcccaccacacagacacaactgaaattaatatctccttgtagttaatcccaacacatagatacgattgcagttgatatctccttctagcttttcttctgtgcatttttttctttagttggaatcgtgtcacatgtaaacgtctgtgttctgcttttctttttcctctaagagacagtgtctcattctgtcacccagactggagtgcaatgacaagatcatagctcactgaagcctcaaatgcttgggcttaagctgcccaaagccctgggattacagatgtgagccactgtacttggccctgcatctgctttttaatttaacgtgagatttttctcatgttactctacactttacaccaaaaccatctcttgcggtgcacagtgttccaccatcacgctgtcatatcatttctctgattgttccttttgctcaacatttaagtttttttctaatttctccttgtcaaacagttgtagggaaccatgttgctcttcaggcttgttttgtatgttacattcttttcctgaataggtttgtggttagaggagccggtagcagtgtgctgtcttagaaagggcatggacttttgtagtagatggatacagattgcaatcttgactattgttttcttgctctctgaccacaggcagcttactgaactgctgtgctttattcaagggtcctaaactggtattgggctgttgcctgttaggaaccgggccacacagcaggaggtgagccgtgggccagcaagcattactgcctgagctccgcctcctgtcagatcagcagtggcatcagattctcataggggcacaaaccccattgtgaactgtgcatacaagggatctaggtttcatgctccttatgagaatctaatgcccaaagatctgaggggaaccctcagttcatccccaaaccatcagttccccccccagccccagtccatggaaaaattgtcttccacgaaattggtccctggtgccaaaatggttgggaactgctgctttattttctttgtctgcacagtgggggcaatgccacccaacttggagggtggttgtgaagtgaaggataatgactgtgaggttcccggccttgtgggggacacttacatcagttgctgtgttttcttctccaagaacagacctgaggggcagtgaccttgggatcaggcacacctgctttggaattggtcattcctgagtttgcatcccagctctgccctcagagatctatagccttgggcaagttaacattcctaacctcagtttattcatttgtaaaatgagcatagtgcatcaaagcttataaagtagttattaggatcaaatgaaattaataaagtgttattacttgtaaagcacttatatagtcccagtaatatagctcattctgaatacatgacaggctttattgttatgactgttactattacttttgttgtcctcattgttcttatccatgctggaagcgggctgtagagaagctgcggtgggagaataaagagagacaccttagtccacttgtaagtggtgacagtcataaaagcttccaggagggggtgattcttgacgcagtcttttttttttttttttgagatggaatctcactctgtcgtgcccaggctggagtgcagtggcacaatctctgctcactgcaacctctgcctcctgggttcaaatgattctcctgcctcagcctcccgagtagcagggattagaggcacctgccaccacacccggctatttttgtatttttagtagagacggagtttcaccgtgttggtcaggctggtctcgaactcctgatctcaggtgatccacccacctcggcctcccaaagtgctgggattacaggcgtgagccactgcgcctggcctgaagcagtcttaaatgtggagttgggagtgagtggggtgggggccctgtgagctctcccaggccccaagacgagatgtctgggcaaagggggaagaggggaagagcgggcaggtaggagaaatggccccctgctgtgaaggtcgaaacagtgcagatcctgagaacatccctccaattaacagccccaggggtctgtgaggaggagagtattagatttattatattgtgatgtcttttgctttttcatttaggggcttgagcttttcttcttcttcttcttctttttttttttttgtttttgtttttttgttttttttgcattgaagttattgatccacagtgtacgaatgatgctctcctgctctgtggtctaatgaaaaaagtcagctctgatagaacacatcaaaaagtgaaataaactcattcccttaaaaaaaaaagttgaccttttgcaaaaagtgtcagaaaatgggtccatctgtgttacgtaaagtgtgagttttctctctgagttgaatgaagtcaggaaatgatcatgaagaaaacttctgcttcagagtgtcaagaattgaggggtgttgctcttggtcacagcatcttctgagctgttacctaaacccacagccggtgctgtgaggtcgggtaatgctcacgacatagctttagctcacaagctgctttctgaagtcttgttccttcattcatttgttctttcattcattctttctttcagctaaccaggcaaccagtgaacccacgaacaaagacttacggggaaccttctgtgcaggcctcttctgtgccctggggatatactcaggaggccagagagataagatggctgctcccaaggagtgcaggcttaataaacagttcagcaaatagcactttacttttattcagcaatgagtgctgggaaggaaataagacctggtgatggtggaggggacgaggacacaggggtggaggctgctttatcttgggtcattgggaaggcctttcttcatttttcttcattgattggggcaggaatagtccttgggctttttggcagcccagactgaacagatcggtcctccgcatttacgcattcgccaattaccgttagtcatggctgtttgtatatcttgtattctaagacttgaccctggttctccagaaaccttgtggtgtggtggaggaaacagatgcatttttggggtccaggctgtcactgtaaatattcatgatgagtaaggggcacacaccaggactgtagaagtccagggtttgggcacttagcccaggctggtatggggagtgctcaggaagacacatcttctggagaaaaggtggcctgggctggtggcaggaggatcaggcagagaaggctgggcagggcatcctaagaagggggatggcaggaagcagagccagggaacagcacgctatgtataagagcagcaacgccacacacgtgccgcgcgtcacctcctgtaggcccaggggcagaccctgccttaactgtgatgtccgagtacagggctgtctaggtccatgccttcacttgacagtgacaggagcttggctagtttatgtgggagggaaaaaaagttgacgagaggagaggcgctcattctgctagaattcaatggcagctcacagaatgaagtgtaggggtgagaggctgggtcttgcagccggggagcagggctccccactatgcaactgccaggggcagaagactttctccccatgtgttgactgtgcattggttttagggaagggctttggtggaccggacctggtgcatggggtagtgtgatgccgggcctgggccatggcatgggggtgagggtgtgggtagaggtgggttctgtggcagagccactaggaatatgcagaatgtggagcgggttcctgagtggaaggagccccagggaaacaaaaccaatcacatgcttctgaaaagttgtgtgtgtcccgttcctttcagaccctgtggaggtccactcccaccacgagtcattacatttgtctacatcttggttagccacagttctgggcagcttttgtcaccttgaaaacagagaaaagaaatgtcttgaggggagataatgtcgatgtaacgagccttcttcctctgccttaacgtccactgattggaacaccccatttagaaactcggctcacaggatcataaaactgtaacgattggccgggcgcagtggctcacacttgtcagcccagcactttgggaggctgaggtgggtggaccacctgaggtcaggagtttgagaccagcctggccagtatggtgaaaccccgtctctactaaaaatagaacaattagcctggcgtggtggcatatgcctgtagtcccagctactaaagaggctgaggcagaagaatcgcttgaacccgggaggtggaggttgcagtgagccgagatcatgccactgcactccagcctgggcaacagagcaagactgcgtctcaaaaaaaaaaaaaaaaaaaaggaaacttagctgggcgtggtgggcgtggtgggcatggtggtgcgtgcctgtaatcccaggtacttcggaggctgagacacaagtatcgcttgaacctggggggcggaggttgcagtgagctgagattgtgccactgcactccagcccaggcgacagagtgagaccatgtctcaaaacaaaacaaaaacccagaaaactaatgatcaaaggccctattcagctttctctggacccattccagttcatagctgttttcattcctgatgcttatgccagtgcttaagggtcagtctcctctgcttaacttgctggccagagtatctgtcccctgccccctgttttgaggtcctcacatggggcatccttcttaaaacctcccatgcttgttctcttgcccagacctagatcaaggttgatgggcaagtttactgggtggtgtttatttcatgccatttgacatgctggggtggagagtttggactatggattgaaacatgcttctgcctggcctcaggcaacttaattgacctttctgggcctcagtttccttctctgtgaaatggggataatattataacaggaacaaatcggtaagataatactcattattgaccagagtgtgtacaaagtagtaagctctcagtggctgtttttgtttctctgtttgcctgaaataggaagtagctgatctgtgagctctaagatcagaaacctgggccctggggacaggcctgtaccctgaaaactgcaaagcagggtgtttggtggggtgggaggcagcagaagggggagcagggcgagggagccgatgttcatccattttttgtgtgtcctgtctcagagccagagtgatatgcctggaagtgctagtcgggggtaatatgtatctaaaccactgttttctaaactgtgtcctgaaacagccttgtgtaccctgcaacccccaaagcagggccttcccataacccacccaaagacagttcctccaagtgctagggacccgccaacacccctgcacaacggctgggggctttcttaacttcctgcatctgacaccgaaggccctgctgacctcatccaggacagtacaggtcagacaggcctttgctccagtcccatgagcacactgatgttaacctgtaaggaaaggctagaacggggggatgccaggcctgacatctagcatgggaagtccctccatgctgccactttgtaacagacgttacagacgtctgttacaaagtataaattcagccttctggggtcccagagaaaagggaactggcacttggtgtctttggtgtcagtcctgttatggggggcggtggggggggtttggtcatctcttcatggggaagaggctgtgatctgtgaccaggtcatataccaggagcttgaccttgggccagtctgtccatccccaggcccaggagagggttggagggatcacatcactttgccatttgcagctgttcttcagttgcagagaatgtgtgcaccctgctgccctctgcctctccgtctttcttcctctgtctcctcccgtttccctctattcctcccatcccaagaaatcagcacaagcatcagctgataggacccatctggtcttagccagtattgagaataaaggcattttgcagggacacacttctgccttacaactgtttcttaaaattctgaagtgttctctagatcagaaaaagatcccatttattaaactgatgaccagcgaggagacggtcaggtagtttagttgaagggagcagctcctccttagggcacctaagactcaggccacaggcaggcgggtacgaggctctgagaacctgccctgcttgaggggtcctgggcatggctttggctacttccatttttatgaatccttctagacatctcttgggacatagctgtttcaggacacagtctagaaaacaccagaggacgcagtttagaaaacaccagtttagatatgtatttcctccttgatgagcatagttctcagcagctgcatccagtagcccagtctgggtcctcagccttgtggggttcttttgctttgctcctagaaggccccagctggaatgttgttacccatgatcctgggtctccttgcagcagagccagccactccatggtgaggatgcactttgttggttcccctggcttctgggccttgggcaggttgaaatggcaggtgtagtcccagctgggcagggcatcctgagagaggggatggcaggaagcagagctagggagcagcacgctatctgtgggaacagcgacgccacacacgtgccgcgcgttacttcccgtaggcccagggtctgggccttggggttggattttgggtctgccttgctcctggggcagctgctaggatcaaatgttgtgggggcgggtgtcaatggcactcaattggggcgccgcacacaccgtgagttttatgttggtgatgcagacgtagctgaaggttgattttccaaaggggattaaagctcttttcctggcgatgcccgagacccctgctatgctctgctgcagcccccggaacagtattggcacaggtgagggccacgcctcctccctgggcccaggcatcaggcgctggctctccacaggaggccgcagcttaaggagctcacagacgtttctattcggagagaggggaaggaacgaagacaggaacacagcaccgtttttagtaccaggagacagcgacagcttggcgtcagtgcgatgcgtgacatttccgtgtgtaaggtgtgctgctgcctggtggagtggcgcgcgagcacctggctgctttcctccctgccagatgccatttcaggaaatcgcctttgttgctcaggcattcatacccctgactgctcaggcgcagcctggcttgggattcaggagggctgaggggcctctctgagctcccctggtgcctggaaggactcttcagggtcctagcccctggcctgccatgagggccatcatctttaggcactttctgaccgggggactttggctgtgtccttttgagacacagtgttgccctgtggcccaggctggagtacagtggctcactgcaacctccgcctcccgggttcaagcaattgtactgcctcagcctccctagtagctgggattacaggtgcctgccaccatgcccggctaatttttgtattttagtagagatggggttttgccatagtggctaggctggtttcgaactactggcctcaagtggtctgcctgcctcggcctcccaaagtgctgggattacaggcatgagccaccacgcccggcctctttccttgtctttgaacttgaggtatcgctagggtatttccagtgtcccagtccaggcctgacatctctgaatacatgaaaggaaagtagcaaacctgagattctgaaagacagtttgtgttccagcttagaatgagagacagagaaagcaacagcgtgtgcataaagaatcatgggggtttaaaactgttactgaaatcctgtaatttttcagggtagcccaaatgaatgtggtatgtttctttctctttgcttttcctcctatttttcatgctttctctctcactttgcttttcttcctttcttggtctgtttcttttctctttctctctttcacctgagtcctggcaaggtgtcacacactgtgctctcagctcaggatggagtggatgggcctgaggccctgcccaccgcattccctgtctcatagcggggagagtcaggttcagatggctgtgaggcaatgggtcagggggtagtgtgagaggagggttgcctgtgccaggcatgggagatggtggcctttgcggaggacaggtgacatctgaactgagtctcaggacatacatatgaagtacatcaaggggcagaatggggctggcaggtagacaacatctctgtctccccgaattgctggttagctgttctgagtcctttcccctcttgaccctggctccttccccacccatagctgccctctcctccttcatagccccaggacccagagtccctgggaggggtcaggagcacaccggcacccagatttatctccaccatcttccccttgttgcttcaggtgaaatctcaaaaatgcacgctggctgctggcacttaatgtctttttcggctgcaccatcagtgaagcagggctggccttccaaaccactctggggggtgcccttccccccagcccagggccactgcctggcatcttcatgctgggcttgctgcagctgcccacagcccagggccccagcggtccatctgcactgccaggcccagctctgcctggtgtgggctcctcaccccatgtggcacagatgcagaaccttggacttggacttgggagcacacgtccactcttggccaggggctgctggcttactgagagtttcctgttgacctttccaagcagcctcagagattcacctcttggcctagcttgggcaggagtggggaggtgagggggcaggagtaggggggcatctctggactatctttattctgacctacttgatgcatcaggtgacttgaaggcagccaccagtcccatgaggccaggcaggcagttcactgcaggcgtcccagccccacctggtttctagccaaggcatcagccctccttgggaaactttgacctaatttgagagctcagctgggttcagcgctctcccctctccctttattttctttctgctggtgtccttctcctttcccccttaccacccagtttacctctccccttcttcatttacccgctcactccagcccaggacccctttactctggcagaccctgtcttttcagtgatcatttgatctcaacctctgtccaagcaggaaaaggtagcagcctagatttggacattcttttaacacagaccagcattgaggctgcgccttgctgggtgccaggtagaggcagtgaggctgcctggtctgtggtggcaaggatagccagactcacagactttcagaacttcagctcagaggtaagagcttgtcgttgaagaaatgatcataatcatgaatgaacagtcagaaagcccagggccttttgagcacattaaaatcagaagaggtcacatttgaactgagatctgatgactgagttggagctaaccaggtgtaggggtggaaggaacgttctagactcagggaaggttctgggctgagggcctgggatggacaggagccgggcctgttggaagaactggaagatctaccaggctgcagagagggaaacacagcagggaagggggagaatgatgtaaggtgagggtagagaggaaggcaccggacaggattgtccacctgccatgtagaccattgtcttccatcgtggttgcacatggcagcccgggcttccaaggcagggctcagagcaggtgagaaggaaggcttcccttccccagcctccctcatcagtgaggccagtctttcccagaggccctccacctgctcttgtcctggttgcaggggcacctgagaaagtgtcatttgccagccttgcaatgggaagcagcctctgtaggcagggaagagagctgagagacggctagtgggccagcagctgcatgtctaccatgacctgcagtgacaagatagtgacacctaagagccactggaagtcaccagagaggccagcggggagtagtgggtcctgattttccggtgtggagtcagggcttggcttctgagttagccactatattagtttgtttttacacttgtgataaagacataccagagaccgggcaatttacaaaagaggttgaatggactcacagttcccatgactggggaggcctcacaatcatggcggaaggtgaaagtcccatctcacatggtggcagacaagagaatgagagccaagcgaaaggggtttcccctcataaaagcatcagatctcgtgagactcattcactaccacgagaacagtataggggaaattacccccatgattcagttatttcccactgggtccctcccacaacatgaaggagttatggcagctacaattcaagatgagattggggtggggacacagctaaaccataccagtcacatactagccatgtgaccttggtacacttactttgcctctctgagactcagtttcccacttttctgctagggcagtagtacaccttcacccctgcagtgggggaagagcactaacatgcttggtgcagggtgggtgctccccagatgccaagtggtattttcctggctctccctgagtatctggtggggttcagctggctggccaaaccgtccagctggtgtgtgggtgcaggggacgtggggatgcagcccaactctgcctcctggaattgcgtggccttgggccagcctcgcctcttagagtctcatgtataaaatgggaatgtcacccaccccaccggattgactcgagactgaaagaagctgtgctcgcaaagggcataaattggaacacggcccagagcaggagtcagcacctgtcacatcctccctccccttgccttgagcttcagccttctctctttctcctgtccttaaaaacaaaagaaaagagatattcacaaaccataaaactcaccttttcaaagtgtacgattcagtcactttttaggatattcacaagattacgcaaccatcaccactctaattccagaaggttttcatcaccctggagaaactctgtggctgttagcaggcagtctccatcacccccacaacccttcccctcctagcccttggaagccagtaatcgactttcttttcttttttaagttttatttgaagttcaggagtacaagtgcaggtttgttacgtaggtgaacttgtgccatgggggttagctgtacacattatttcttcactcaggtattaagccgagtcctcattagttatttttcctgatcctctccctcctcccaccctccacccaccagaaggccccaatgtgtggtgtttccctctgtgtcacgtgttctcatcctttagctcccacttctaagtgagaacatgcaatacttgattttctgtttctgtgttagtttgataaggataatggcctctacccccatccatgtccctgcaaaggacatgatctcgttctgtttttggctgcatagtattccatggtgtatatgtaccacgttttctttaaccagcgtatcatcgatgggcattgaggtggattccacgtctttgctattgtgaatagtactgcagtgaatatgtgctaagcatgtgtctttataatagaatgatttatatttttctctgcagatttttctctagatctgccttttgtgacttagaatcgtagaaatcatacaatacgtggccttctatgcttggcttctttcacttagcgtaatatcctcaagtttcatctgtgttgtagcatgcatcgctacttcattcctttttttttttttttttgtgatggagtttctgtcgcccaggctagagtgcagtggcgctatctcggctcactgcaagctccgcctcctgggttcccgccattctcctgactcagcctcccgagtagttgggactacaggcgcctgccactgcacccggctgatttttttttatttttggtagagacggggtttcactgtgttagtcaggatggtaccaatctcctgaccttgtgatccacccacctcggcctcccaaagtgctgggattacatgtgtgagccaccacgcctggcctacttcattccttttaatggctgaataatatttcattgtttgggtagatcacatttttcttatccattcatctcctgatggccatttgggttgttccccatttatggctgttacgaattatgtagctatgaacattcctatactagtctctgtgtgaacgtttgtcttcagttctcccgttttgtggttgtccttccattttgatagtgtcctttgaagcacaaaagtttttaatgtcggtaaagtccaatttatctgttttttcttttgttgcttgtgcttctggtatcatgtctaagaatcctttgcctacttgaggacacacagatttagccctgtgttttcttctgagagttttatagtttcaactcttaaatttagttatttgatccattttgacttttgttttgttttgttttgagttagattctcactctgtcacccaggctggcgtgcagtggcgtgatctcagatccctgcaacctccgcctcctggattcaggctattctcctgtctcagcctcccaagtagctggaattaaagacacctgccattatgcctggctaatttttgtagagatggggcttcaccttgttggccaggctggtcttgaactcctgacctcaggtgatctggccacctcagcctcccaaagtgctgggattacaggtgtgagccaccacgcctggctttgacttaatttttatatatggtatgaggtaaggatccagcttcattttattgtggatacccagttgtcccagcacagtttgtttaaaaaaaaaactgttctttcctcactgaatgatcttggcactcttgtcaaaaacaagttgactatagatgaatgggtttgtttctggactcttgactctgtcccttgcatctctatgcctgtccttctgacagtgtcactcagtcttgattactctggcttattaggacgtcttggaatcaggaagtgtctattcactctcctaaccctgtttcttcttttctctcttcttcccttctctccttttatcttttgtgcaatctttagggcaagagattacaagtgtttgttgtaaagggccagatagtaaatattttatgtctttgtaggccgtgcagcctccatctcagatgcaactctgttcttacagagtcaaggcagccataggctatatgtaatgaatggatgtgactgtgtgtttttttgtttttttttttttgatatagggtctcaggctgtcacccagacccaggctggagcgcagtggcacaatcatggctcaatgtagctgctaccacctggactcaagtgatcctcccacctcaacctctcgagtagctgggactataggcacttgacaccacacctggctaattttttctttattatttgcagagacaaggtctcactatgttgcccaggctggtctccaactcctgggctcaagccgtcctcccatctcggcctcacaagtcctgggattttaggtgtcagccaccatacctggctgtgttcaaaaaaaacttttttttctggtttgacactgaactttgaatttcatatactttgcccatgctaaagaatactacttttcttttgatttttttccagctatttaaaaatgtgaaaatcattcttagtctgtgggccgtatgaaaacagccagcaggccaggcgtccagcctggtttgagaggagtgcgtctggagggaacagtgtgtcagaggaagatggagcatctgcctaaatcctgccgggcctagggcctgcgtgggctttctctgtcatgctccttcctatggaagctgctcagtagatcctgctggggacatggcattgcggcactgagacatcagagcagggtcacctgtgtgctactagaggggcccacgctgttcctccctgactactctaccaacccctggccaaggcagcagagagagtctttgcgcagatactctgataaatcaaactacaatggatgccagccacatgttttaccttttcttctggaaaaacacacaatcctcactgcaccccaaaacatcagctctaaatctttctaagaggagcatggctttttttttgagatagggtcttgctctgtcgcccaggcaggagtgcagtggtgctatcttggttcactacaatctctgcctccccttcaagcgattctcctgcctcagcctcccaattagctggaactacagacatggaccgccatgactggctaacttttgtgttttcattagagacaggttttcactatgttgaccaggctggtctcaaactcccgacctcagataatctacctgccttggcctcccaaagtgctggaattccaggcatgagccaccgcacccggccaagcacgacttttaaagccagtccaaactctgccggatggctgtcatgtgtgactttggtctagtaagttagtctgtctgagcctcagtttcttcacttgcaaaaagggtatgggatgagtgagtaccttcttcactggggaatgtgagcattcgaaacttgcatagcacctagcatgtaataagcactcagtatagcacctagcacgtaataagcactcagtatagcacctagcatgtagtaaacactcagtatagcacctagcacgtagtaagcactcagtatagcacctagcatgtagtaagcactcagtataagacctagcacatagtaagcactcagtatagcacctagcacgtagtaagcactcagtatagcacctagcacgtagtaagcactcagtatagcacctagcatgtaataagcactcaatatagcacctaggacatagtaagcactcagtatagcccctagcacgtggtaagcactcaatatagcaccgagcacgtagtaagcactcagtatagcacctagcatgtagtaagcactcagtcaaagctatttgctgctgtgctgctgtttcttcccactgcatcccttattgcactggatgctgagggagatgcaggtggctgcttccagcccatggtggttccctgagcctgcagcctcatctgcagcataggaatagacacagatactcaagtactggccccagatcctggtacatagtagatgttgacttttcttctttgcctgagctggattaggtgggtgtagggggaattcttgttccataccagagtaagcatttgtggcctgtttctggcacaggtacctgagtcattttcctggactttttgaacaagggagagcgtttttctccatggcctccaagcctcactccccaggctacaggtccttccctctgtctcttccttgtaggccccaccccatttacaggtcatattcatcacatctccagaaccccttcctctagatcaggggtgagcaaactgtggcttgtgggccacattgtcccctcgacagtgtttttttttgttttttttttttttttgagacagagtctcactctgacagagtctcagtcatccaggctggagtgcagtggcacgacctcagctcactgcaacccctgcctcctgagttcaaggggttctcctgcgtcagcctcccaagtagctggactatagacatctgccaccacgcccagctaattttggtatttttagtagagatggggtttcaccatgttggccaggctgatcttgaactcctgacctgaagtgatctacccacctcggcctctcaaagtgctgggattatagaagtgagccactgtgcctggctgacagtttttttttgtttttgaataaagttttattgtagtgcagccatgtccattcatttatttaatgtctgtggctgcttttatacaacaaagacaaaggtgagtctttaggacagagcccgtattatccacaaagcctaaaacatttatcatctggctggctgcagaagacgtttgctgaggccttatcgagatgcccccgcttcagggctcctgtatgctgagccgtcctccattctacgctgttcattctgtacactgagcaactctcctgtgtgcatctccccaggaggctggggctccctgagggtagggctctctcatcctaggtgcccaccttgctcacaacacaggcacatagtaggtgctcaatacctatgaagtgatagatgactggctgggtgaatgaatgaaagaatgaaataaacatgaaatagtaaatcaagatggagttcttcccaggtccacctaagctaagctttttcacttacaaaaaaatagcctcagtgtacagtgggttcagaacttctctttctgcagcccatcagcttcctctccaacctcacaagtaggtgtcaccagtaaaaatggctgacactcagcatggcgtctactgtatgccaggccctggattgagtgctttacagatattaaccaattcaaggctcgggacaacgctaggaagaaactcctgctgctgcccccattctacagatgaggaaatcgaacacctgagaggctaagccacttccccaaggacactaagctagtaaatgtgtgtgaaaagggagtgcattcaaacccaagaggtggagctcccgagtccacgctttcgcgctgcacacctgcttccatgcagctcctggacgtgcagttgaaacagtagcttctcattctttttttttttttttttttttgagacagagccttgctgtgttgcccagcctggagtgcagcggtgcaatctcggctcactgcagcctccacctcttgggctcaagcagttgttcagcttctgcctcctgagtagctgggactagagtcgtgcaccaccatgcccggctaatttttgtatttttagtagagacggggtttcaccatgttggccaggctggtctcgaactcctgacctcaagtgatccacccgccttggcctcccaaagtgctgggattacaggcgtgagccactgtgcctggccccatttgtttttgagacaaggaaactcctttcagagtctctgcctagaatcttaaaagctcagcagagtcattaattgttctttatcatctggtgggatatttaatgtagtaactgcctctaattgagtgggtaattcaggattgatctagcactccaagagggacccactgtgtgctcaatgaatagagaggagtcagaggagcttatcaagaacattgctcagaataggagccagtatcgatgttttagttggaaagagttggccctgtggaggggattccttgcagagtttcatggcagtggagctcctgttgactttcctctgtgccttgttaggtatactcaacacttaacatggatgaggattaaatgatttaacctataggaaacacttagaatcggctccagtatgtactaagctctcaatatgaaatggccgttattcacctgttttattaactggatcccaacgagctgcctcatgttctttattttctaagggcaggattgacatatgtaaaataggagccaggtgtggtgactcacatggtaatcccagaactttgggaggtcaaggtgggcggatcatttgaggtcaggggttcaagaccagcctgaccaacatggtgagaccccgtctctactataatataaaaaaaattagcagggtgtggtggcacgcatctgtagtcccagctacttgggaggctgaggcagcagaatcacttgaagttgggaggtggaggttgcagtgagccgagatggtgccactgcactccagcctggcgacagagggagactctgtctcaaaaaaaaaaaaaaaaaaaaaaaaaaaaaaaagtaaaataaatgctacagaccagcaccatttcttaaatacaaactttgattctgaaagcatccaggcaattgaagaagtcccatcggcttagcatgaactttgggcacctttctgtcttacctttttctgcagatggacaaaagtatacatgatggatttttgttgttagcggaattctaaaaatcaaaactaaaaactatcctggtgtccagcctaatcctggatacccccaaagattctcaatcagtactttctggatcaattttcacctttctaaacctcatttttaatctgtaataacaaaagtccagagaaaccacccggacagagccgagatttcataaatgggaagaagacagtgtaaaccagcagcctgttctcctaggtcttacagcaaaatcaatattcccttgctgtgagacccgaatggtggaaaccagttggctgaggggactaattggagccttttgaaaattccctggcaggaattgagatgcaggttaacagataagattgccagctcgtgtgttatttttcaaagctctctcctgagattgtgtttgtcacttggcgagagtgcttcatgtgtcccacaaaagcgggaacagccccaccactcagagagccctctcttccctgtaccctgcccctctcaacacacatctgagtgtctccattgctggcacggttgtcaggaagacactagggaagggcttttatccaatgggataaaaacctcccccaaatcagctgatggtagctgagatcattcacatctagcaccgggaaggcctaggattggggcttgggaatgatgatgatggtggcgttcccgggattgtgctgattgtggatgtatgaggcctgtgtctcgcagtggccccaccagggcaacagcaaaaatgacgttattatctccccatttatggatgagcattgaagttcagaggggttaagcaaggtgaccaaggacacatagcttgtaagtgacaaaaccaaggcttgcgtccgggtctgtctcacttcaaagcctgtgagtttccagctgaccacctttccatgtcctccttgcaaccccagtgaacttccctgaatccccttcctcagatccctgtctttggtcaaggatggtggtgatggtgacagacaccagctgagtattggacagcgtttttacctgattcccatgatacattgccatatcttcaattgctggtgaacatgtttttcataaagtgcagattattaaattgttcaaggcaattgggaactcttttttttttttttaggccaccaagtcagtgatcctgtttgactgcagttatttttcatggtgacacctcctgcttatgtacagcccaacatctggtggcatactaaaggttctgagaagttgatgagaaaagagcagatgacttcttttttttccagaaaatcctcttgccctcattgttggctggaaaagcctgactttatcgcattccaccctgctaattatgggagtggctgcccagtgctcagagacagaactgagactttccctgaagtgtctggctcatagtcatgtctgtcagtctttctccaagacaacaagctgtcctgatcaggtgcatcaaacttccttgcatccagctctacccattttcttctaactaagcatctttctttgccttttggacggtagtgatttgctttggttttcgcattcactaggctctacccataggtaccaggttgactcccagtgattatctctccaagctaggggaagagttgctggctgcagggcaggtttgcattgaggaagaagactcagtttagtttcaacgtacatgtactacgcaacctaatttctgctggatatggtgcccaaaactggggatagagagatgagacatagctccttaccctcaggtggtgctcagtctagttggggtggttagggaaggcaggcacagcagcaggggatagggaggaggaatagtgatagaccttggtctagggcattggaggaacacagaagttgggtagaattgaggagaggagaagagaccagggaaggatgttgcagggtgaagatgctggaggcaagccctccaagataagtagaacttagccaggcaaagaaggcacggtggggacaagcagagggaacaggcttgagaataggcatggcaaggacagggatcatggcatatgtgtgagcttggagtgagctggtttaggtggattatgcagtgcaaagcaggtaatgatgtttgtatttggcatcttaactcacaagtgacagaaaacccaaaccaaactggcttacagaaaaagggaatttgttactctctgtaagtcagtagtcttggggtaacctggctgcaggcacgggttgatcaggggctcaaatgcagcacctcccgcgctccagctgtgcatctccctgctctgttttctgcatttagaagtcacaatcacttcagaagctatttgtctgaggttacgcaggttgcatccaggcctgtctcacttcagagcctgtgggtttcctgctgaccactatcccttctcttccttgcaactccagtgaactttcctaaatcccattgctgaaatccctgtctttggtcacagatggtggtgacaggggcagacaacagctgtacatttgacaatgtttttacatgatttctgatatgatttggctgtgtccccacccatatctcatcttgagttgtagcttccataattccccacgtgttgtgggagggacccggtgggagacaactgaatcatggggggcggttcccccatactgttgttatgatggtgagtaattctcaggagagctgatggttttataagggaaaaccccttttgcttattcttgttctctcttgcctgccaccatgtaagaggtggctttgctcttcctttgtcttctgccatgattctgaggcctccccagccatgtagaactgtgagtccattaaacctgtttttctttataaattacccagtctcagtatgtccttattagcagtgagaacagactaatacaattcccatgatatatggagacactcagttgtgtgttgagaggggcagggtgcagggaagagagggctcttgagtggtggggctgttctagcttttgtttgggcacattctcaaacagcctttcttctcatgggcaggagtcaactgtggaagctgcaaatgggatcaacttgacttcaagtcagtgagaaaagggtacagctctctatcccattaattggaaaagctgcacccaatcataggcaatgatgtgcccattcctgaaccgcttgctgtggccaagggaatgaggtgctctgattggctgaggcccgaatcataggctctgtccagcacacacggtgtgagagaagggaagacggaggcttcccggagagtggtcaggccacggttaccaaagagggtgcaatatgaaccaggtggcccaaaggatgagctagtcagatgggctttgtctgcttgctgaagagcttgggcattgacccagagaatttaagtggaggagtgacatggtatgattggagctttaggccaatcattgtggtggcactggggaacctagggtcgatcagggaccatttggaggtcctggcaagtacagctgatgaaggaccaagggcaggagtggagaaaacccagaacacatgaggaggtagaagtgcctggacttgatacagcatccccctgcttgcccagtaagcaaaccgagatgagctccaccaagcagttgagtcagggacccagtactagggaataacaaggcttctgaccatggctctgcacagaatatgcaccttctacaagcaagggagaaagtacgtctcctgcccccaaagtagccacttttgtccttgaacagaagagccgcagaggtacttactgctatttttattgattcaacaatctgctactcgctggcctccaaactcctgagagttatgagctcattactgccaaccacattcctctaaagtacacattaggttcataaacacaatttcagggctctgtgcgaaatggagatgctctgtaatagaaaattagcttcttccccaccagctccaccaagtttatgtttcgtctccttggatggcagtattcttggtaggggagagaaagcaatccatggagctgggagtattagaggctgattgccgagtaggagcctcctcttgtccccaaccatttaatgatccggtggctgcccaatgtgtgggatgacctgtgacctgctctgttctatttaccaaccaaagagattccatgcagcagccttttagcattaacagaaataggaaaggctgccatgcactggttgcattcaagaaacggatggggccgggtgcggtggctcacgcctgtaatcccagcactttgggaggctgaggcgggtggaccatgaggtcaggagatcaagaccatcctggctaatggggtgaaatccccatctctactaaaaatacaaaaaattagccgggcatggtgatgcacacctgtagtcccagctactagggaggctgaggcagcagaatcgcttgaacctggaaggcagaagttgcagtgagcccagatcgcgccactgcattctagcctgggtgacagagcaagacttcatctaaaaataaataaacaaacagatggtttctaaccaaactggccttaccggatacctccagttctctctttcttaaaataagggagtgatgtctttggcctggataagcagcttgagccatatggttcttctggattcagctctagaaagggcccatgctcagctgtttagctttggacagttattgagccccactgaagctcagacctgtcatctgtgggatagggtgctggacccaccctgagggattatcatgaggcttaaatgaggtagaacagctgtagggagctcagtgcaagttctagctgagtggccctgggcaactctgagataatgcccttcagtgattcttggccaggggtggttttgttttgtccctacggggacatttggcaatgcctgaaagcattttttattgtcacaactggggtggctgctactggcatctcatgggtgcaggctagggatgcagtggaatgtctcacaatgcacaggacagctcccatacaagactgtgttctcaatagcgggtagccgtcaaatggtaagtgctctgtgccagggactgtgctaaatgcagaaagtcagagatcagaggcagatgcccaccgctgagtacaccgctccgtagagaccagaggagttcagaggagagttgcctcatacagcctggaggcaggatggggtgagggggtgaaggatggctttgtggatggggagggcatctgagctgagtctggaagttgccccaatcattttctctccttcttcagtggatgtgagggagggtcaccagccctggggactggtgtcgggaagaggtagcttgcatctgtgactgccagacccctccaaatgtgaggtcacatgggcccatgagtgtgaggagaggagccgggtggtgaaggtgtcggcaggcatggtgctgtgggacaggaactgtcacctctgctccgacatgagatcacaggtctatctatcctgttcaagttgggttttaaaataaaattgctccttgttctgactgcagctgtcatttcttttgttatttctgaggccgtttgttagtaagaggaataatttagagcttggaggtggacttcgtcttggctagttgctaggcacccactttctcaaggcacggggccctagatgcaaaaaggatccccagcagtaagacctggggctgtctcacttggtggcagcatgtgcctcccctcccacccttcattctcccaggcgtatagacagcagagtgccagtgtggcatttccacagacgaaccaactgctgtaagcctctgaaacaggaatgttacatatatggctctcatgccacctggccctattcacctgtccatggcagacgtggccaatcaatcacagactttctcatcgaactcagatgcattctcagaatcatcccccacatgaccaccatcttccccaggcaaccaccactgtacactagagtaggcaggtagctctagacttggcaggtttgccatccttgctggaaatccttactggcggtgtgaccctgggcacatcatataaccccaatttatttcctcttaaacaaaatgcagatgcctaatgcctactttgcagggttgttgtgaaaacgaagagaagtaaaaacaaacaaagtggctgtcatggagtccagctggagtaagggctcagtaattttttttttttttaagaaatggggtctcactgtgttgcccaggctggtcttgaactcctggtctcaagcagtccttgtgcctcagcctcccaaattgctgggattacaggcatgagccacctcgctggccctcagtaattgttccttttcttgctttttgcataaaagttacccttcaaagactgcagtgggacttgtggttcatttaattctgcttgatattgtcatttatcttttcagctgtatttgtttgagtcctcaataagactgtaggcatttagatggcagggaaggtatctttggaattttttttgtcccctggccttccatcaagatgtggtaattggatgtataggagtgtggcagacactgctagttgcttgctgaaaatagccatgggttttttttgttgttgtttttttccttatctcttagtaacagagccctgggcattatgcccacatagaaaatagtaaatttctcagcttcccttgcagctacatatggccatgtaactaagatctggccagtaagatataggtagatgtattggttgtggcttcccagaaaggctgcttatacctcatctgcgtggtacatgccttgcctttctgcttcttgttgcctagaattgagatatgataggtggaactccagcagccgccttgggccatgtggtaacctgggggatggcaactctgcagctaagatcgcagagcagaaagatggacggcctcagtccctgatgactaaggagagcagccatcccaattctggactgcctccctgcagactgcttgtccatcagaaaagaagccccaagtgattagaccccagctattttggaaccaaatgcgattcctacctgatgcaaagagctctttgagtagaggctgagagaactgctgcccagaactctagaggtgacatagcacatggcgtttagggacttatagtcaacagctagttatgagtttccatgggccacaggtgctgctggcgaatgtggcttgctgctcagttgaagagcgaacatcgaaaataacccgaagagagaggtgaggaagaacagatcaggcagggccctgcaagccacgtctgggaatttagacttgagcttgagtgcagtggcgcatcattggaggaatgaatttatttatttatttttattttttatttttattttttgaggtggagtctcaccctgtcacccaggctggagtgcagtggcgcgatctcggctcactgcaacctctgcctcccaggttcaggcacttctgcctcagcctcccaggttcaggcacttctgcctcagcctcccgagtaactgggactataggcatgcaccaccatgcctggctaattatttcgtgtttttagcagagatggggtttcaccattttggccaaagtggtctcgaactcctgacctcaagtgatccacccgcctcggcctcccaaagtgctgagattacaggcatgagccatcacgcctggcccgttggaggactttaatttacacttgggaaccattgctctggctgtggtgtggaaaaggagtaggaggcaagatagctggttttgtccctcctgacaaaggtttcctcctccttctagacgacctgagtctgttagccagctccaagacgcccttctccttggtagaaccccaccgagtctgatttgggtggcaagttagagcttggtctacgcctggggtttctaaagcccccacacctcgtggcccttttggctgggacttccagaccctgggtctaccccatcaaggactttttttttgagaacctccagcattcctggtcagccacacaccaggcaagccctgcataccggcttggccagcacccgccgtggctgtaactgacctctaggtggcggtggccacctgctgccactctggctcccagagccctggccaaggaagtcctctttctccccacattagccagtgttccttgtctcttccctccctgagttgtggatcccgggacctacctgtttcttcctctgtcttaggtgagacttttctgacttcccagttttcgctgctatgagtgtcggtaacttcatccagtaggctttgcaaagtctttatttgtgcagaaggctggaggaggtgtcacagtgccacacacagagacttgcatatgcagaccttggtcttgactgtcagaagcgtccatcctttgctcactgccagatgcttataagcaaggatagatgagatgtaggtggcccggtatggagggtaagccctccctccttccttctttcctgcttgccttcttgtttccttctcttccttccatttatccatccatctacctacccacccatctagcacccgttgggcatctccaggaactgagggctcctaggggtttccatcttggttcttgccctcaaggaattcattgcatagtaaagatgaagacttgtaaaggtacaattgcaagtaaatgttcaggtgatgttcatttattcatctgttcatttgtttgttcattcattcattcatagtattgaatatccattatttccaggcactggtctgggtactagggcatagtgaataagactctggtcatgtactcccaagaatatgtataattagtatttgtcaattaaaagaataaaatcttaaaatgtgcagagcttacgttcagtggagagaggacagcaagccatcaataaataaagtcttgatatgtaccacagattgaggtcagcagctgcgattgcctgccatttcaaatgattcatcttgtaaacagacagtgtcaacctatggcatcaataaatacagcacgatactggaaaaaactaggcaagataattgctcattataccaaatgctgtgaagaagcagagagagaatgatggtagaggatagttttggggtggggtaagggtgtatactgggtggcatgtgtgcacgtgtgtgtgtgtgtgtgtgtgtgtatgtgcatctggcgaaagtgatgtatacctggtggggcagtgtgtgagtacttggtagtgtgtgcacctggtagtgtgtgcatggatgagcatctgatggggtgtgtgcatgtgtgcctgaagggatacgtgtgtgagtacttgatagtgtgtgcacccggtagcatgtgtatgtatatgtatctggtggagtatgtgcatgtgtgcctggggggatgtgtgaaattgcctcctttcagggagaggatgcattgggattgtgagcttttccaaaggtggaaaggttctgagctgctggccttcacagagacgtacctaggttgatgggagctgctcaggagcaccctctgaactcccagaaggcccggggcattagcatcttgtctgccgatggcctccagagagaacactgtgcatctcaggaccaaagcagtgtttgagttgcattgacagagttgattgtgatactcgaggcttcctttgccataatgccaccctcttctagtgggcagtaagctgtgatgtcagaccagacccctttacccttttcttctccttactaagtagcaatacattcagggcaggtgaagtcacattgtgtgttcatgtagcatttaaggagagttcaacccctttccagaattgctaataacagtacaataaacaccggtcatgctttatgcatgtgttatgtcacaaccctcttaggtgggtgctaatactatccccgctctatagatgctaaaactgatgctcagaaaggtaaggtaggttggccagggttgtccagctggcaggtggtggagtcgggggttaattgaggcagcagttcccacagcctgcactttaacctctgttctctggagtggggcctccccactcttagtgattgggaggcatctgtctgtgttttgcagagatacggcaggtctcaagaatggcccacactatacctcaatgccttgtctagagcctgagctctttctctactgcttcaggacagggtggtctggaggaagaacacagattaggtgggggaaaagacaaaggttcaaatcacgtctccaccactcactctgggtctttgggcaaggccctgttcacacctcatttacccatcataaaaagacttggaccaggcaaaatggcacacgttagcctctgccgtggtgctttgcaagcctgcaagatggaaaaatgttcatcccagccccatcttgtatgtgaggaaattttaaaacaaaattgaatgctatcttacgggcattgttatgagagagaaatgagtacattgggtaaattaactgtattacgatgtttgtggtctgcatacgggtgcaatttgattgcgtggggagacaaaagagggttcctcgtgatgactaatacatctctttaaacatacattagagagaggtgcagagagtgtgcctatcacatctgaaatgttctattgttctgtttgtttttcattactctgaaatgattactgcaaaaattcctaaattggatgcttttcaaagaggaagattaaagaccataagcacagtcttgcagctgtgcaaaaaagactgtgcatctgtagatggatggagagccttaacagcttcaccttgggctctgcactgcacgtggagaaacctcaggcccattgggaagtggcagccacgttccatctgtgagcccagagggaccttagttggcattttgtagcatatctgccccgagctgaccaccatctgcttggcattatttaaaacctcttaaatgcatttcggcgggggacaggtctccataacactgggacagggaggcagaagccttctggagaaaccagacggaaaccttgcctggttgcagaggaggaagaagcatcaaacgcgagccctatgcagacactgagtggtctcgcttctgtggctgcctgagaagttgcagctctttgattaaagatcagtagttatttgagggttttgtatttattatgtacattttgttgttagacagctatcactggtcctgtttctagagggagaaaggaagtatttatactcttggtgttggctgcaaggttgtcccagccaacaattcccagtcacggcgaaggatacaggaaggagctttgaattgtgtagatgagttagaaggccagttaaacccagaaagggcaatgctgtgagcaccaaggaggaggtagcctttggagtgtgtcgcaatccactccccttctcttcctgcacacgccgcacacatgcgcagaggcaggctctggccacagctcattggcccagagtgagcactcacacaggagaaaactacccagatactggcccaatcagattctctgttggtctcaggtcttttcactacaagtggcaaaatcttaccttgagctggctaaaacaaaacaattttttgccttatataagtaaaacattctgttgtagcttgatctagggtctcagctattctccttcctcctccctttctcccttcctcctcctccgccccctcctgctgtcttcttcccccacctcctcctccccggtccactcccccctcctcccaccgtttcactctcccctcctcctcccatttcactcccccctcctccccctctccacttcccctcctcccctatcctcctacccgccttttcccccttaggttctgcgtctctgtactgtgttctctagtaggttcctctcctgtggggctcaccagcagctctgagcttagatcctcacaggccaagaaatgtggctatgaaacccctcagctctctccctgtcatacaggctcctgatgggcctggatggggtggaacaccctcacggtggtgcatgcaggactttgattttcccagccttgatctcatgcctactctagggtcagagctggagcgggacccatagggagcccagagacaggctgggtggagagtgggtccctaaaggagaactgaagaagaggaagtggatggcaggcagagaaagacaaccactgttcgcacggaggcttcctcctggaccatgcgggattatgcctcagagcctgggtcagtctgcatgcacgtggggctgggtggagggagtgtcatatctagaccctgagctcgggaggtggagaaagcaaacttgcagggaggaagcaggatcccttgggtgtgcagaggagcagagcagcatggcctcgcagctaaccttggacttgggtggctttctggtcactggtcctgcccctcaggaggcccagcagtctttccagctcttgctttttttgagatacccttgtacccgtccagtaataccccatttccccaaagccatagtgaactggcctttcttcctggtaatcaaagagtctgtgactaagaagatagaaggaccagcgacaccatcggcctagctcacagagttcctctccagaagagaagtgcctggctcccagtgtggttggaaatataccgaacagaagcatggctcagcttccatgcagccagagaagctcctgattctgtaaagcatagttagctgtggcaggagggagagggccattcaggatcacatcagaaggtgacatgctagtggccgtcctggctgaatcacgacctccccagcccattccttctcacaagagctgttttgccgaatgagacttcatcacccaaccacggctcgcagccagacgcagccgaacaggcctagtgcggctgaaactttccttcagagggggaaaccctaaaactgtctgctgggcatagtgatttctttagtattttcagagttgagtgccttgcttgttcaaatgccaagattatttttaagtccattatattctcactgatttcctattgtcaagaacattttatttggaaaggtcttagtgtaaccaaagtagaaaactccttctatatttttagcttggtcttccctcttgttacctcctcctccccctggccagctcctcttcatccttcaaggctttgctcagccatcacctcctccaggaaactgcattccatgtcacctctccttctggcctcctgtgcatccctatgccataacacttattccactggactataactttttggctggctggctgcctcacaaatgtgtgaactcttttttttttttttttttgagacagagtctagctctgttgcctaggctggagtgcagtggtgcgatctcagctcaatgcaacctccgcctcccgggttcaagcaattctccagcctcaacctcctgagtagctgggactactcagggtgcatgccaccatgcccggctaatttttgtacttttagtagagagaatttcgccatgttggccaggctggtctcgaacgcctgacctcagccttccaaagtgctggtattacaggcgtgagccaccgtacccagccaaatgtgtgaacttctttagaacaggcacattgcttttgctaataatagccgacttttgttaaatatttaaatgttaagcaaagtagttgattttcaaacacagtcctagaagttagatgcgataattgcccacattttacattaagaaattgaagcatgtgtggagagctttagcaaattactgaaggtcatacaactaatgagaatatgaaatcaagattctatctcaggcagccttagtcttattgtgtccataaccactgctccaaactattggctcagctcagtatctctccttggagccaccacaagtctggtgcctagtaggtgctcaataaacattgggtgaacttcaagagattggatacctgtgaatgtgcagctgggctgacttggaaggaatttccagaggtggttttgctgcttctattactgtgacgaggggtagaggcacgtttggcttcctgcctgcatggaattttgcagtcagagcaagttctaaccgcagcccttcactccttctctccaagacaaatggaaacttattctgttcttaaaactcgtctcctctatcagaagctttttcagaggctctggtgctgaggctgcagggtgaaaagtaacctcccatccgtcacagcaattctgcttcgggttggaaaacaatttgaagcatcgcgtcttccaagaggagttttcctttaaattttttatgatagaaaatattcaggctggccaggtgccattgctcacacctgtaatcccagcactttgggaggctaaggcgagcagatcacttgaggtcggaagttcaagaccagcttggctaacatggtgaaaccctgtctctactaaaaatacaaaattagccgggcatggtggcaggtgcctgtaatcccagctactgtggaggctgaggcaggagaatcacttgaacatgggaggcggaggttgcagtgagctgagattgcgccactgcactccaacctgggtgacagagcgagactctgtctcaaaaaaaaaaaaaaaaaaaaaaatatatatatatatatatatatatatatatatatatgtatacacacacacacacacacacacacacactcttatatatgagaaaatatccagaccagtgtggagatcaatatctcaaacaccctgaacaccctgggcctcagctgtggcttcgctctgggtgctgggctcgatctcttgccataggtctagtccccagcgagctctcagtcctggccctgcagcctgggctggaccctgcttccatggtcagcttcactttccgccattcactcttggacattgcctcttttttcctgaaggatagagacgtgcctttcattttgggatgtgacttgccttttcaagtacctctacagtttagtcttcatccaattgtatctggggagaagagggaggattggaggtgtgttgtcttcacagtgccaaccagaagtcccacttaacttgaaaaatagcatttaatttttctgttaccaaagtctgttcagtagaagaaagaaatctggaaatcttgaaagaagataaacaaaataaaaatctatcaccattcagaaatagcagccactgttaatgttttaatttgtatcccagtcttatttctggggatttcattatacacacacacacacacacgtgactggagtcatacttatcaatatatcataagcagtgtcttaattccatgatttcagaataaacaagggtccagcttctattcctcactgcctcccccaaacccaggaagacttggcaggtgtttgtatctatgaagagagaagcagaagcctgctctaccttcacagggaaataaaaagctctatgcagaatatcagtgccgcaaatggagcagcctgtttagcaatgcacatggctaaggggggatcatgtgcatgactcaaatatccagactgcaacatgtgactgcaggatgaagtcatacttccttttacatccccctgctatgatcgctggatcccccagcagcttgattgccggaaattagctcccatagcagtgactccagctatttctgagtttcccaggagctgcctcacgtggactcagggactcgccccttgtgattttctctgtggcccctgctgctgctgcccatgctgaagatgccccttattaggacgccaggctcctgggcactgctgcccgtcagcggtcgttgtcgctctgacttggggtggaggcggaggcactttctctgcattgctactcaaacccagatgtgacagctgggcctgtgccgtatatccacacaacacaactgaggtgaggctagaagtttttcattgcctaatcacctctgtattagtcggttttcatgctgctgataaagacatacccgagactgggcagtttacaaaagaaagagctttaattggactcacagttccacatggctaaggaggcctcacaatcatggttgaaggcaaggaggagcaactcacatcttacatggatggcggcaggcaaagaaagcttgtgcagagaaactctgccttatacagacatcagatctcatgagacttattcactaacaagggaacagcatgagaaagacctgcccctgtgattcaattatctcccaccgggcccctcccacaacacgtgggaattatgggagctacaattcaagatgagatttgggtggggatacagaaccaaaccatagcaacctctattattaaaaattgtttttaaatttttaaatattgacaaataaaaattgtatatattcaaggcatacaacatgatggtttgatgtacatatacatcgtgtaatgactgccacaatcagattaacatatccaccacctcccgaagtgagtgtgtgtgtgtgtgtgtgtgtgtgtgtgtgtgtgtgagagatgacacttaaagttggctttctcatcacattttgagtaaacagtaccatggtattgttagccagagtccccatgctgtcatcagatccacagaacttatcttctaagagaaagttataagatgtaccctttgaccaacatcacctatctcccctatccatccccccagcccctggcaacccccgtctgttctctgcttctatgagtttatccatagaacttcactcacgtccgcctgtaagtgaagtcaggcaatatttgtctttctgtgtctggcttatttggtgtaatacgatcccctccaggtttatccatgttgtcacaaatgacagaattcccttcttttttatggctgaatattattccatggcgtgtgtgtgtgtgtgtaccacatatattccatatgtggcatgtttatgtgtgtgtatataaatatatagacacaccacattttctttatccattcatctgttgacagacacctagtttgtttccatatcttgtgaataataatactgcagtgaatatgcgggtccacatagctcttgagggtactaatttaatttccttttttattttaaagtttcattttatttttcagttagttaatttgagacagggtctcagctctgacacccaggctggagtgcagtgatgcgatcacagctcactgcagcctccacctcctgggctcaagcgatcctcccaccctagcctcctgagtagctgggacttacaggcatgtaccaccacacctggctaatttttaaactttttttgtagagacagtctcactgtgttgcccaggttggtcttgaactcctggcctcaagggatcctcccacctcagcctccgaaagagttgggattataggcctgagccatcacaccctgtcttattttctttagatatatatccagaagtaggattgctggattctgtatggtagtgctatttttatttgttggaggtgccttcatactattttctatgatttactttcctgccaatagcgtacaagagtttccttttctcgataccctcaccaacacttgtctcttatcttttggagaagggccatcctaacaggtgtgcagtggtatctcattgtggttccgatttacacttctctgatgagtggtgatgtgagcaccttttcatctacttgtaggctatgtgtgtcttctttggaaaaatgtctgtttacatcctttgcccattttaaaatcagattatttgggatttctgtatatattttggatattaaccccttatcagatatgggggttgcaaatatcttctactttgtaggttcttttcattttgttgtttcctttgctgcacagaagctctttagtttgatgtagtccaacttattttgtttttgcttatattgcctgtgctttggtaacatattcaaaaaaattactgccaagactagtgtctacaagctcattccctatgtcttcttctaggagttttacagatcttacacttaagtctttaatctatttcatgataatttttatatggtgtaagacaaggctctaatttcattattttgaaggtagatattccgtttgcccagcaccatttattgaaaagacagtcttttccccattgtgttttcttggtggctgtgtcacagattagttgaccatatatgtgtggatttacttctgggctttgttctgttctcatggtctatgtgtctgtttttaatgacagcagcaaacgattactgtcgttttgtagtatagtttgaaatcagggactgtgatacctccagctttgttctttctcaatattgctttggctattcaaggtcttctgtgtttccatatgagttttaaggttgttcttgtatttatgtgaaatgtcattggaattttgatagagattacattatgtagtatggacgttttaacaatattatttcttctagtccataaacttgggatatcttccatttgtttgtgtttttttttttcagtttatttcatcaatgtctgatacttttaagcatatagatatttcacttccttagttaagtttattcctaagtattttatttgacaaaattcaacatcctttcatgataaccccccaatgaatgaggtatagaaggatgtacctcagcataagaaaactgtatgtgacaagcctacagctaacatcatactcaacagtgaaaagctgaaagcgtttgctctaggatgaagaacaaaacaacgatgtgtactcctgccgctttggttcaatatagtactggaagtcccattcagagcaattagacaagaaaaagaaataaaaggcatccaaattggaaaagcagaagttaaattctctctatttgcagatgatatcatgtcatatagaaaaccttaaagatgccaccaaaacaaaacaaaacccacaactgccagaactaataagtaaattgagtaaagttgtcagatacaaagtcagcatacagaatctggtgtgtttatatacactaacaatgaaccatctgaaaacacaaatttagaaaagtcccatttataataacatcaggctagaacttttaataaaactttatatacagcagcatagtgatcatgggagagagatacagcagggggacaacttttagtggctactaccagatgaacctgccgtcagatgtggcacccccccttccagagtcgcggcctgtcttcagagcgtctttgaaaggggccttcatgccttgcttgtgtccaccactcccttgaaaaggccagcttcctacctcaccatgatctacctggagccccagcccaacagccatgaaccaaagcatggatagtttcatgcttaagttgtgtcctccttagttttctggcaggggctggtgttggcagcagttgggactgaaagaggccatagcagttggctgcctgggctcttgggtcctcggtgggctccgaggggattggaaagtccattaacttagcagggtgacataaagtggagactgttccatgagtcctctaacagaggccatttgcatcttcctttggtggaaatggtccagtccatggcatatctactcatagactttgttttagagccaaagggtgggcacctggaccagaaattcagtgagttaggggaacaagagtgcccaccttttcccctggctttcctaggtgtgaaggaaaaggcagtggccagtgatgcgaagatgtgggccatgaagtcgggcagacctgggcttcagtccttgtttcacttctaactagctctttgctagaccagtggctcagactcagtaagggagagttgcaaattcttctccatcagggcttatggcaagtaaaagtgaatgggccaaccatggtccatggccagtagtgctaaaaatatttccttttctcttagagacatacatctgtgttctctctccagtaatctaaaagtgagtgaaagaaaacccatttgtatataaatggctatcgctcactagggcgaagatccatgctctccttttccttttccaaatccataagagctgtagatgacagtcccatgctctgagcagcccccggttattgtatttgacatgtatccatcaggcacatgcacagacacacgggtgacttcctgcttctgtgggattgagaggggcaggacctgtcagtaagacactccctggcagtgctctcatggacgggcaaatacactgcctgcatccactctgacctgttcgttcattcgtttgttcgtttgttcgttcgttagttcgttcgttcgttcattcattcattcattccattcactcattcattcattcattctgtccttcttaaaagtttagtcctgggaatatatactgagtgtttcttttgtacttcctgtggataaaattgaccagatccatgtcctcatggagctgttcctctggttgaaggagaaagacaacaaacaggtctacctagcatgccagatggtggtcgtgctggggtcagcactgacagttgagccagaaacctcacggagtgaggggataggcatcgaggctgtccagggacagggcactccaggcagagggaacagccacagctccagctccggctctgtggctccacccacttcatcatcctctaacatcccggaccgggccctggtcacctccagtatcgtcttggatccctcgtcctccctgccccagctgccccagcctcctttcacttgtcccctgttacacgagcccctgccacatgttccctctgccctgccctttgccctacagctgttccccttccaggactgtctactctgactccttttttttttttttttttttttttttagggggagttttactctgtttcccaggctggagtgcagtggtgtgatctcagctcactgtaacctctgcctcccagtttcaggcagttctcatgtctcagcctcccgagtacctgggattataggcacccgccaccatgccccgctaatttttgtattattagtagagacggggtttcaccatgttgtccaggctggtctcaaactcctgacctcaagtgatctgcccgccttagcctgggattacaggtgtgagccaccacgcgcaacctccaactcaatattttggttgcagatcaaacatcaaagctcagctaatccaaccccactcccaggcgtggtgcccctggcagaaccaggccccctcccgcagccctcatctccctttgaaagcctgtgtttctatgggtgattattggcatcaggtcagctgaggtccccaaggactgagccctgggaggctgggatcctgcctggttttgttctccatgatagccccagggcccagcccggagcttggtatacaacaggccacctggtggtgactgaggagggaacacgcagttctgcctgggggacagcggggtttgggaaaattgaggagggtcttgaaggaggagtacacaccctcaacctagcatccagttctcatcatgtctaaaaactaataaaacagcacaggcagtgtcagcggggtgggaaggctggtctttgggcacttccggccatgccagtttcagaagcattgagtcaaatgtccagagacagtagagcatgggctgaaatggagtgaacgtaatctgtgcacctcagttctctccgagacacaggggctgctcttcagctacagttacggtaccacggttccaggtaaagcacagactggctgggtctctgccacatccagacctttatgctacatccttctttcaaagatctgtggaatggtgctggcaattcttagtaaataatgcatttcctcttgtactaggctgcctcatttacataacccagtgaactgaaaagtcgtttttcttgggccaagttattcatcttattcttggcatttggctgcaataatatccgtctatcggcatggccatacaataattcaggcattttgttctagcagtgaggacacttatagttaataacacatgaagccatttcattaaaaggaaagttttgttaggatacattaacacaggccttgaaccaaaacacaaatcatttcattccctggctattgaggaagcaaaatgaattgggaacctgaagccattttttgaagaatcgttgttatcctcatgtcatctgattctctctgcattcaacagtcagcataaaggggatcagggttttaaggagttgataacacttgtttttctctgaggtggaaaagatgtggtataggctttaggggcagcattcactgaaggcccggtgctagttccgctgctcactcctcgggcaatagagagcgcatttcttagttgctccaggtttgttttaaggcatacaaaactgcagggctggctgggcgcagggtggctcacgcctgtaatctcagcacttttggaggccaaggcaggtggatcacctgaggtcaggagttcaagaccagcctggccaacatggtgaaaccccgtctctactaacaatacaaaattaaccaggcatggtggcttgtgcctgtaatcccacctacttaggaggctgaggcaggctgagaatcacttgaacccgggaggcggaggttgcagtgagctgagatcgcgccattgcactccagcctgggcaacaagggcaaaactccgtctcaaaaaaataaaataaataaataaataaatcgcagggcttttgtgaacattgtgcgtaacatgtctggcacctgacaggtgctgtgaaatggtacagctttttctgtacgtccaagaaagttccagctaatactagttttcactcttgaatattacaacatgcagaaaaaagtatttagttttgagatgcaggactttggatcattaaggagttagtgaagtttgaaatggagagggaggcatttggtctatgctgcaggaagcaggggcagcctgacatgttggttccacgttcgctgtgtgtcagtgaatgtttatttctgagttctcaccgccttcatgtcagcgggtttctctgtggggtctgatccttgcaggggtttgtaacatccatcaagtatctcctacgaggtcctcctcctaaaatagcactcttgcccgggaacctgggggcttgcgtggcagggactggataaatgcccaggccggcctgcagccagcagagaggtgcaccgagcttgttctgagtcagaagcccggggaacgcttcccgggttttgttttagcactcagaaacccactcgagaaggtcatttcctgaactctgctgtttctgttgagttttctgaaagcggaggggatgcttagctgtccaatccacagagcacgctttatgtttgtgtttccccgcctgcctagcatttgacaattaattagccatggtaattacctgctttaatttcatgattgcacatcctataattagccctaattctgtaatagggaagttcatatacacaaaggcagccgatgatgaaggtgataagggttacaatattaacagctgccattgcttattgcctgccaggcatgggcgaggcacgacacctcacaaccacccagtgacattggcattggcctgccttacagatgaagaagctgagtctcaatgtggggtgtcatccccagggtcacagcagccgaaaaggataactgtggggacgtgaacccaggcctccctccctatgtagctgtgcgccttcacactgccgttctgcctcttgcaggagcacccgagatctgacatgctttgggctaaagacgcccgttcctatgcttggcacacccttaaaccagattgagggcttcagccacttaaaggaagcttttacatcttcattctttctgtctgtctgcctgactccctccccacatcttcttttccacccgcttatgggagtgcatgtttgtgtgtgtgtctgagataaattttaccctggaatgttgactgcttggtggttagatgttttagtacgtgtacaaaatgttgtcctgaatataattgcttaattctcctcctcttccaaagacttagcctctagcactatcttcatttatccaaatagagactcagggcttgaagaggtgaattaacttacctaggatcacttggctggcaaggggtgcagctggaattcgaacccatttctcactgaggccagaatccagtgtctgggctccctcccgatgctgacgtatgacgatgtgtcaggtccacgtggatgtgtacccacagagccttggcactacctcctgccccatctacggcctggcttagacatccctgccccacaagttagggtgaaagctcactctcccgaggacagcgaaggcagggctatgttttgtttttgcttttaaattcaggattaacataaaatacaatcaggtgtatcaatcttaagtttatggttcaattaattttacttctgtatagacctttataaccactgcccagatatagatcctggatgtttccagcacccagaagactcctttgtgccctgcacaagaatcctttctcccgcccaaggtcatgaagacattctaccatgttttctcctcctcgctttatgatttcacttttcacactgaggtctatgactgcaaaagacacaagtgcaaaagccacacacgcaaatgttcatagttgctttattcatgaaagtctcaacttgaaacaacctaaatgtccaccccagcagaacaggtggatacaaacagggaaatattcatacagtggaatactattcattagtgcaaagcaacatgagggccatacacagaaacacagctgcatctcacgtccacagtactgagtgaaagaaactagacccagaggagcacacactggttccgtttaggtcaagttcaaaaacaggggaaggctgggggtggtggctcacgcctgtaatcccagcactttgggaggccgaggtgggtagatcacctgaggccaggagttcaagaccagcctggccaacatggtgaaaccccgtctctacaaaaatacaaaaattagccaggcgtgtggcaggcacctgtaatcccagctactcaggaagctgaggcgggagaatcacttgaacctgggaggtggaggttgcagtgagctgagatcatgccactgcacttcagcctgggtgacagagcgagtctaaatctcaaaaaaaaaccaaaaaaaaaaaaaacaaaaaaaaaaagaaaaaaacagggaggaaatctaggggatagtgcttagcattgcgggagagcactattgattagaacagggcacagtcaagtctcataggaacactctggtagacgctcttcatcttctaaaagaaagcgtctccttgagaccttatctctactagagcttgttttggattctgttcattgacggactgaggtttttgcatttttttctccccttaaccttcctttacctccactgttattacagacatcatgagggtaattcttctcagtggaaaagaaatcttcagatttgaacttcctcttaaaatgaagaagaaagggtttgccccgatgcccgattacagatattaccctcctatttaatcttcttttgctgagtcaaggagatccgacataaagtggctttttattgcttgttttaaaaggaaacttggttgtgtcagaagaggtcaactctttttatccctccaaggaattattatctttatggctcaagcagaaggaattggagctgatcgaacttaatttggaggggagaggcttttaaaataacaaacaaaacaaaaaattctaacaattttgggcctaagccctctgaaatccttagtgaaataagtccatgatttagttaagtatatgtaattcaaggacaacttaatttgcagagaaagtttcctaactttggatgtttgaagcactgttgttgtggatcagccatttgggtaattttgagtaattttgagtaattttaatggcattagactagcttcgattagatccaaagggagaggcacaaatgaggtgagactggaatgtctgacagcaaggagacctttctgagaacacaggatctgcaaagaggtgcctgggcttcaggggaacgaggcaagggcttctggtcccagctacccacattgctggcctggggttcctggtgccttcaggattctgggtcactgcagcagagcagcctgctgttgtcagaggtgtttgaaccagagcaactccatcttgaataggggctgggtaaagtgaggctgagacctactgggctgcattttcggacggttaggcattctaagtcataggatgagatgcgaagttggcacaaaatacaggtcataaagaccttgctgattaaacaggttgcagtaaagaagacggctaaaacccaccaaaaccaagatggctactagagtgacctctgggtgtcctctctgctacacttccaccagtaccgtggcagtttgtaaatgccatggcaacatcaggaagttactctatatggtctgaaaaagggaggcatgaataatccatttcttgtttagcatatagtcaggaaataaccataaaaatgggcaaccagcagctctcggggctgctctgtctatggagtagcgattctttattcctttactttcctaatcaacttgctttcattttactctacagactcgccgtaaattctttcttgcttgagatccgagaaccttctcttggggtctggattggagcccctgtctggtaacactgtgatagaaagtgttagagggcagagggcaggtagccgtgggttcaaattccttatctccccacctgccctgggcaagtgatctgacctctctgagcccattacttcagctgaaaagggagtgttcgtaccatctgccttgcagattaacttgcggctgggcagtgaggtgcgtagtgcctgggataggactcaacacataataggtgggcggatcctgggtgcagatttaggcctcatgagttttaggtacctagggaatatcacgtcctggtctggagtttgtatcagaggtccagactagagatacagattttggagtcattggcctaaacatgaaacatgcaggcctgggattgcgcatgtgtgttccggggagaggcagggcgtgggcaggagaggaggtgcccatgtggaaggtggagagagagcagttggagaagagggagactgaggcctccagggagcaaaaacagtgggctcttgcatatacattatgaaaaatgtagagtcagaatttatcactcacaggagagagacttgtatttattattacattaacgaggttttaaagatgtgtattggtattcactgattcaaattacgatggcaatttatcattggaggctttaccctgtgggctgttcttaactcgggtaatttttttaaagtgcattgatctctctcccacttccgtggtttcccttgtgatgtattatagttgctgtgtatccttggaaggtgctagggcctgtaaaaggctggtgaagcagtgctcatgttttctctacttggttaaaataaagaaggagtacgcccacgtgtgctggtacgcccatctggatgtgaccttttgttcagttgagctggtaattgcaagtccggatcttgacctcagcctactcattcctaacccaagtccagttcctctccatctgtggggtggtccatgtgatcctggcatagctgcgctattcgtagacctgaattctctccatatcactttgggtgggagatgctgctctcagctccattttgtagatgaggaaatgaatggccagaaaggttgcactgcttgtctgatgggtgagtttgtgcattacatcaggggttcctgaaattgcccactcgtcagaatcactggagaagctttggttgcattcgggattcctgggcctcagatggttaatgccacccacccagtggttggtaagatttggaaaggactaccttctccacaccagatcttggatatgttggtggaaaaataacaataatgacttcttgattatttagatcaggggttatcaaactctttttgtaaaggccagaaaaaatacttgtagctttgcaggctgtatggtctatttcagcttcttaactctgctgtacagaagctccttgacttatgatggggttatgtcccggtaagcccattgtgagttgaaaatatcgtaagttgaaaatgcatttaataggcttcatgtagtgaacatcatagctcagcctagtctaccttcaacctgttcagaacacttacattcacctatagttaggcacaatcatctaacacaaagcctattctataataaagtgttgaacagctcatgtaaagtatcatactgcacatcactagcctggaaaaaacatcaaaatttgaagtgtggtttctactgaatgcttattgcttttgtaccattataaacttgaaaaattgcaagacaattaccagcctaagtgagggactgtctgtatttcaaaagcggccaaaacaaatgaatgtggctgaatttggcccatgggccatagtttgcccaccccgatctagataattagtattatgtatgatgatcagagaagtgattgtacttgccactctccaagggaagtttggacttttataagaatatatcataagcaggtatgggccagtcaagatatatagggtgacagccaggcgtggtgggtcacgcctataatcccagtactttgtgaggccaaggcaggcagatcatctgaggccaggagttcaagaccagcctgaccaacatggcaaaaccttgtctctactaaaaatacaaaaaattagccaggtgtggtggtgggcatctgtaatcccagctactcgggaggctgaggcaggagaatcgcttgaacttggaggtggaggttgctgagatcgtgccactgccctccagcctgggcaacagagtgagacttcgtctcaaaaaaaaaagtgagcaaaggacacagcgacatttctcaaaaaaaaaaaaaaaaaaaaaaaaaaaaaaaaatatatatatatatatatatatatatatatatatatatatatatatatatatatatatatgatgagaattgcattcagttgctcataaaagacccctaaaacattagcttgaacaaattagagatgggtatttctcgtttgttgaagaagccttgagtaactgatctgattataggtttggtgatgtgacgtcagcaataatggaatgacattattgctccttaaggtcatcagagaccccgggacttctgtaaacttgataggcattctgtttctccatctcactccatcggaaacatctatccattcgctaattgaaatgtcgtggttttagtctctagtccttcctcctgttcacagaataatgtgagacattctatggtcgccatactagagtttgaacacataatgtctgtgtttggggttgatgggtggctttcacgtaggaacagaatttatcactcacattagagatgcctgttttcatggtcatagaggttttaaagatgtgtattgacactcatggagtgtaaattacaacagccctttatccttggggacttttctctctgggctgttcttaactcatgtaattttaaaaagtggattgatgtctctcctgcttctctgtttttccttgtgatgaagttgctacttgcccctggaaggtgctaaggcctgcaaaaagctgatgaaacagcccttacattctgtatccccagagtattctctaaggagtcataacttgattaaaataaagaaattctatgtcccagttatgcttatcccatctggacacggcattcggtctagtggggcagatctcagctcttgccccctcccttctttctgaaactgaattccacctcatctgtgtggtggtcggtgtggtcccaggcaccaccacattgccctccaaaccacctttggagcgaggtgctcctctcagctctgttttacagatgaggaaacaagtgtccagaaaggttgactagcctctcaccagcacgctgttagtgctgcaatacacacatgacagcaacatgaaacatgcatctctgctattaattgggctgtggatctctgttgatgttgggaaaatagcatacagtatgttcttcccataacttgcctgatttagtcattcttgcctgtacccatctgttcagctagcactaataaatccctgctctatgccaggaactgggcatccagtggtgtgtgacacagatgtgactcttgctgcagttggttttcatggggaaagcatagccgaaatcctactcctttataataagggtttaagaggaattcacattttctctttcttgacaggtctacatccggataaaagacgatgaatggaatatttatcgccggtatacagagttcaggagtttgcaccacaagttacaaaacaagtaccctcaagtgagggcctacaacttcccacccaaaaaggccattggaaacaaggtaccatcccgtgctgggaagcccacttgtcactgcctgcgttaaaatggattatttattcttcttctttagtccgttgcttaaaaacacatgctccttaaagaaaagttggtggagataagaaaaaaatagagaaaagaaatagccattcataattccaccacctaaagatggtcaccattacgtcatgtgtgtgtgtatgtcctcttatttctctagggcaagaagttggaaaactttttctttaaagggccagagagtaaatatgtttggctttggggactttaccatttcagtggcaaatactcacctctgctggggtcctgtgtaagcaaccgtagacagtacagacacaaatgagtatggctatgtgccaatagcattttatttttaagaatagacagcagctggatttggcctataggttagtttgccaacccctgttctggaccaaaaaatgcttttctagttttcatccgtagttgtcatgatgttcacttcaacttgtgactgtggagtagaactttctcagaggagtttgttgttgttgttgttatatggttattcacctcatgaaggttaatgatttatgatgacccaatttgtcgctgtttattcatcccggttcccttgaggaaggaggtgctagccctctgcaagctcattggttgattaatattattcactcagcagtcattaattgggctccaattgtgtgtcattgtgcaaggggctgggttcagccctggagaagacagacctgggtctagaccgggcttggagccctgtcaaatggtcagcttcagccaggcggcatcatgatgtcactcctcatgtttgtttaggaagcagttctctgtcatggccgtgctttggatcccctggggagctttgaaaaccactgaggactgcctgtgccctacctccatccccattctgattgaatcgatctgaagggaggcctgggcatggaggggatgaatagttctctaagtgattgcactctgcgaccaaactggagaatctttggcttagagtcaagaaggagacaggggcacttcatcaatttcggtatgtgttcaatagcttggcagggacagtctgattggaaggtagagccatgacctttctcaggatgtgtaagacatcgggcattgtattgagcatgatctctctgccatggttgttctcaaagtgtgaccccagctagcagcagcaggagcccttgggagctggttagaaatgcacattcttgggctcaccgtagacatgctgattcacacgctctggggctgagacccagcagtctgggtttaacaagccctctaggtgatgctgttcatgaggaagtatgaggactgccgttctatcttttgacaaagccatgtggcagatgccatatggggcgaatccctagtttctgtcttcaggaggtaccgtgctagcatttccttgacctttatcacagaaacacagagcaagagtttccataacccactcctggcacttgggaatttcatagggaaatctattcccaacccttacatttacatgtgtgtagatttctatgtataaaacagattgaaacctgatcacgccaaggtctgctcgatttgaacataaacagttacaaagcaggtttatcccaggcccagaatacatttgtccttcatttttctgttgaggaaaagtagagctgaaccactacacgtggcagacagaaactctatacttgttcatagcaaagagtacaagaattcttttgaaaagaggggaaaattatatattgatttaatctaatgacccataggctcatacaaatcttgggagttattcagaatgtcctaaaatgtcacaaaacaacatgctgctaaccagcgtattatcaaattataagacattcttatgtgcaagaaacacaatcctggagtggcccttccgtgacagcttcttcacggaatctgcctgtgtcttgtgctaagggaaagccattgtagcacaaggtggaaatgaggggatttggaaggggaaaactcttaggttgtggcttaacattgtcctgacttaacattgtctggggtgagtcgtgacttaacattatccaggggtgcctgggaactgcagctttaagcaaaatgacatattgtgttatgaaatgaactttaccatggacaaatggatacaaacaagagttcagttcctagggcatacagtactgtatttagcttaaagtcttagttagaacctgtcaacaacattaagtcaacacttgctgtgttagtttcctcttactgctgtcacaaatccccacaaatgcagggactaaaacaaattcattatcttacaattcgagaggtcagaagtccaaaatgagcgtcacagagctaaaatcaagacgtcacccaggcctcttccttctggagccccaggagagagtttgctccttgctttttcagcttctcaaggccaccctcatttttgccttatggccttctgtcttcagagacatcactcagccctctgcttccatcatcatagtcacatttttctctggttctgaccctcttcctcttagaattccccttagattccctgtgatcacactgggctcacccagatcatccaaattaatcccccgaccccaccctttgtctcaagatccctaacttaaccacatctgctgagtccctttggtcatgtgaggttctggggatttgggtgtggacatctgtgggggccattattgcgcccaccacatgttagacattgctccatgctttctctgcagcctcaaacaactcccttcccacctcctgcctcctcaagccccccagttacacaaaacttaagacaaaataaatctcatcagtcctgaaaacactggatttgagtttagtgagatgaggctgagctctgaggagtgggagggtttttctggtgttgcatcctgtagaaagagggcatgaagctgtcctgggtctctgctgtgcaggagctgggaactgttttgttgttgttgtttgtttggttttttggaggcaaagtcttactctgttcccaggctggagtgcagtgacgctgtgtcaactcactacaacctgtgcttctggaggagagaactgagtctgcttcatgctctccaccctcatccccaggctagagagacaatctgtccctgctcatcccgaggctgattcctcacagcagcaaacctttctcctatgaagcctgtgtcagccaagcaatgtgcttttatccccccaacataaccctatttgcaaatagacaagcttgagaataaaagacaccatcttagtgggcctggcccagtaatgatcagctggtacaagtgcaccagctggttcttaaccagatttgtggtcctgctcccactggtgggggtggatctgaccacccagttcgtgagcagtcttggggccacagctccatttctcgcctgtgcagcttttaacttttaattaacttttaataagctggttgaactgtgattgtcttttatacatatatatatatatacacacacacacacacatatacatacacacatatacacatatatacacacacatatatacatatatatatacacatatatacacacatatatatacacatatgtacatatacatatagacacacacacacacacacacacacacacacacacacacacaccccaaatgtcaccctgtcgcccagggtggagtgcagtggcacaatttcacctcacagcaacctccgtctcctgggttcaagtgattatcctgcctcagcctcccgagtagctgggactataggcacccaccaccacactcagctaatttttgtatttttagtaaaggcagggttttgccatgttggccaggctgttctcaaactcctgatctcaagtgatcctcccacctcggcctcacaaagtgctgggattacaggtgtgagtaacaggaggggccatacccggccccatgattgtcctttgattccttctttctttttctgtgcatttggctaagacatacccacttccctgaaatccaccttggctgctgctgaggacacatcttagtgattcttcccatttccaaaggaggattgagtcaagattcagaaccttcaacacccaacaggggccactggtgaattcatttcaaggccaagcttatgctggcctcactgggcctaataactcaggacacctgctttaatatcccaagagcaaaatttttggagtgtgttgattctacattggcccagaaaaatccgccacgtcagaatcttttctttgattgggttacttcaaggataactcacttgtccgcctggaccattgtggcacacgtctagacaagacgtgtttgggttgatttaattaatttctttctccttttcctttttctttttcctttttccttttccttttccttttcccttcctttcctttcacagagtcctgctgtgtcacccagactagagttctgtgatgcaattgtagctcaccgcagcctcaaactcctgggttcaagtgaccctcttgcttcagcctcccaagtagctgggaccacaggcatgcagcaccatgcctgtctgatatttcagttttttgcagagacagggtttcaccatgttcgccaggctggtctcaaactcctgggctcaagaactactcccacctcagccacccaaagtgctgggattacaggcatgagccactgctcctggccagggttgattgaattttgcatgccttgttactcttaagccttgaacccattaaatgactcactgcagaatccatagacctagacattattcaaggaaatagcaagcgtagtttagcctttctcatttgtcagatgagtatccttctagcctgaatgtctatatatttcccctacaatgccatcattggtgattgtctgacagttttatagttgaaagtgatcttaatcccaatttgaatcttttttaattgacaaaattagcatgttgtatagtgtgtggacccagcatttgtctttaccaaagaatctgttgctttaatatgccatgcatgtgtgtaattatatattcacaggatacccagagctctccctggaggtgtccatgccttcacatactgtatcaagttcaaatcatgttgaaatagttggcctgaatatcagttcaccattcgatgaagtttattctttcatagctgagtcaagccacaatagatacatattgaagttattaagttttttttttttttttttttttttttttttggagacagcacctgccatcatgcctggctaatttttgtgtgtttttgtagagatggcatttcaccatgttggccaggctggtcttgaactcatgacctcaggtgatccgcccaccttggcctcccaaagtggtgagattacaggtgtgagccactgcacctggccatttacttttctttttttttttttttccagacggagtcttgctctatcacccaggctggagtgcagtggtgtgatctcagctcactgcaatctccgcctcccaggttcaagtgattctgctgcctcagcctcctgagtagctgggattacaggtgtgtgccaccacgcctggtaatttttgtattttttgtagagacggggtttcaccatgttggtcaggctggtctcgaactcctgagctcgtgatccacccacctcagcctcccaaagtgctgggattacaggcgtgagccaccacatctggcccattaacttttatatatcacaggtgtggggtttgtttaggccaaggtaacaattccaagatcttggtgacttaagccaacaagggtatatctttggctcatgttctctgtccatcgtgggttggctctgggctctgctcatcacagtgctgggttccaggctgctggaggctccatctgcatgcatgtggcaacaagaacaaggagtaggggcaagtcaggtggtggcttctaaagctgctgcctggaagtgatacatggaaattccacttgcatttcattggccagagcaagttccttggccatgcctaatgcccagggagcaaaggagtcactccagatgttagtgaccagctctaatgacgcaagctgggatgacgtttctgttgaatgacattgttcagcgggactgagatagtaagagcacagcttcacccatccaaaactatacatgcctgtcccatggactccactttcaaaggagtcgcagttcacctgcttcctgcatccctgcttaagtcattctctctttctccctctctcttttttgcttgagacagggtctctctctgtcacccaggctggagtgtagcggtgcgatcatggctcactgcagcctcgaactccccggctccagccatccttccacctcagcctcccaaagtgctgggattacagacatgaaccactgcccctggctcctgtttagattattctaactccaagccactgtcaccgcagtgtggacacctgcagtggctggcctttttctcttttgcctccctgtagcctattttccacgctgtagcaagagtgagatttgtacaacataaatctgattgtgtcagctgtagattaagaccctccagtgacacccctggtacttacaatggggactcgttactgtggcctcagaggtgtcccctggtagctccctcacctccctctcctaccttatctcatgccctgcccccaccctctccactcagccacactggtgtcctaagacatctacactgatctcacctcggggcctttgcacctgtcacaccctgtacctggaatggccattcccagattcctacatggacggctcctcccattcaccagatgtcagttcagatttgccctccttaggcagaggcctttcctgacacccctcactctgctgccctcagtcactctctggccctttcctctgctttaattttcttcccagtgtataccattgattgaaatgacttatttgtgcacttcaatatgatctgtctctctgcaccagcatggaagctcatgaaccaggactggagtctgtttctgttcactgctctgtccccagctcctagaatagcacctgacataccaagatactcacggtctaaattaatgaacaaacaaacagaaattcagtggaagagtttcccttttattttcttcttcgctttgctgggtgttggcacacattcaaaaaatctcaattccaaaagtgagtacataaactttcaaggtgactcgggaggttgttctcacccgacttttggctgaatattttttgcagagtgggcatgaggccaagcaggcttttggagaccggaaaggtggctttctaatggtctgagggagttgaccggtgagctgcctgtccaaatgggctttagcagcatgagggcttaggtaaaggactcgtttttgatgatgttactaaagtctgcattatggctcagggagcgaatgagaatagagagactgtcattccttcttaggataatagattccgtctccaaaagttcatttggcattaaggcaaggcaaatcactttccctggagccacagataattcaacttgttggagaaattatgcattaaaatcctcattaaaaacacatacacccgtgtgtggtagaggaaccgactggtactcgccgagccgtgggaagcccctttgcaacttcttgggaggtgccattggaaacacagccctcgagacggcagggtcagtggagaggtgggagcgagtggacctcatgcaggaaccagaggcaaatgtgtaccgagtgcagggctgttgtgctgggtgcaggggcattgaaggcgaattaaggttcggtctctgtccttaagaagctggcagtcttgtagggaggatgacatgtaaatgagtcctcaggagctatatgagctgcagggaacctggtgcaatctgcagatagaggagagagaagcagagaaggcttcctgcaggaggcgaaatgcttgaggggccacagggctcccagccagaaatctaggagagggagtaggtgggccagcagaatcaatgcaaggcatcctttctgtacatcccggatcagtttcctgtggcttacaacaacacacatttattctagtacagttcaggaggccagacattccatatgagcctcattaggttaaaatgaaggcgtcagcgaggctgcatttctttctagagactccaggggataatccttctccttgccttttccagcttagaggctgcttgcatttcttggctcgtggccccttcctctgtcttccgtgttgcctctctcccaccattcttctgttctcagatcttcccccgatcacagcagggaagagttctccactttgcagtaatgtgattagattgggcccacccagattatccagggtaatgtccctgtgtcagggcccttaatttcacctcctctgcagtggcccctgtacagtagcatattcacaggttctggggattgaggcatagacactttgggagagggtgggcctcatcctgcctaccgtacacctcttcttccttcttccttcttccttgtcctgggtagacaactcttactgttagcccactttacaaatggggcagcagaggtacagggatgtgaagtgacttgcttgggccatctcgcttggcagcgtcaaggctgatatctgggcccaggcaggtgatctgccttcagcctctgtgagcacagcctatcccacaagaaggtcggctgtagaggatcctggaggctggacgggcagaatcagtcagccgttgcccatttgatggacattcacattaactccctaagtcaactcctcaacctcagtgccgtggagagcagggggcgggtgaggaggggctctgatggcctgtctctccgcccacacccaccgctccacccttgcttaggggccatttttagagttgggagtgctgccctcatagttcatccacaggcttgtaagaacttccctgttaatcctaaacttgtggggtgacagttactcgttcatttatttgtgcatttattctttcaatgtgactttaccaactctataagtaagaggctgtaataagcactgagagtcaaagaaaaagaaaaagatccttaaggctgtactatctgtgtggcctcgggcacgttatttgacctctctgtgcctgtttccccttttatatactaggaatactcatgccacttctagtattgtgtttatgaggattgaaggtggttacatctgtaaagtgctcagaacagtgtctggcacatggtaagatctgtgttcaggtttgttaggtaaggggcattgggctggtagtgaagtggggcgagcagacacacacgtgcgttctcatccccagcgatgccaggaccctgaacctgtgcagtgggtgagcccgacatggatggtcccgccgaaaacctcaaagccagtgtttccatgtacactaacaccagccaccatatgccggcttgccagacacaccgggaactttgcatttattttctcatcatgcagttcttatcaggctccatataaagtgtttatagatgaggaaactggggctgaggggcaataagcatcttgcccaagctcccgtagcttgtaagtgccggagccaggaattgagccgaactctgcaaatgccgccgcaccacccagccctccgtggagaagccagccgcacacgtccatgcccaaatctaggagctggtgatgcagagagtcacctactacaggtttcagccgtaaagttcgtcatgtgaagacaattcagaagatggtgggactccccccacctgttcgcagcagagatgcagggagttcacacaccatcccccgcaactgctagggctccacagagaaatttgggagcgaaaagcagctctgagtgaatgaagccataaactcaagcctgtgtctcatttgacactctgccaaccaccatgtaaatattcctagtacttaatgtattaatcgagaagaagagagaaactgggctcattatacatcccacatttgtgtttctctttaatacagtaaaagcctcttaagatattttccaggagagcaaccactaacgtcatcttgccagaaaaaaaacatctcaggggagagaccttggtgagcttcagactcagaatatgtatgtggaggcctatgcataggtatatatatgtttaattagtgtggtttcttgggaggacttttctataatatcaaattaaaatccagtaagaaaaaaaattaaggtcatttatagacaaaagaatccagagccagccactgaaagcatatttgctgttctgttcccatcctgcatattttctaggtatagcacacagagaagctgaattgaagagactcctcttggtggtctcaagttgtagaacttgctggtcccaccctccattgtggccttcatacctccaccaggaagtcttccctgacttcaaaaacatgagccgcccttccctgggttcatttctcatactccatcgcatcacggttgcctgattgacagttcttccttcccgcagtcccccccgtccccgcacccatgacaccatagaattagagggcagagcctggtcttacttgagtctttgccttcttgggatctgtcacagtgccgggtacagagtcgaacctgtttgttgaataacgaactgaagctgtgtggaagtcattgtgtagcaccggctttgctgggtggttaatttcctttctccctcgtcctatgtcccttcacttccaggacactgtcattcatggtcgttcatagatgctcagttcccatgtggcgccatctcacctgcccgctggacattgaccagctgatacttgcaggaatttccatgaagactctgccttagttgttcctggtgacaaagaaaatttgtttgacacttctggggtctggtgttctcagtgaacccaccagaattggccagcttgccccacttcactcatttcaggctgagttcgaggaccctatttctaggtagaacgcattggttttgtgattgaatgaattataagacaacttgactccgttgggcattaaacgttggccaaagtatttctggggctgtgagtttccttgtatatccttatttagtctctccttccagctctaaaagccttctgaaaagacttaacccgtattctatctgcttttgttcctcacattttcagacaactgattaaaatcacaacttagaagagtatttcttggctcttacccttttgagtagttggagaataattgctacctttcccttcagtattctcattaatatttgagaacttcaaacggcagaaaaacacaaaaaacaaattgagaactgtgtattgcaatcttggttcatctctaacacgctggaaaaaaaaaaaaaattcagcctctcaagttgccaccagttggttatttcctgaagccacctttttggagttcacaaccccaggctggaggaatcctctccctttctctcgtccttctctgcagtgtcatgggccacttgcatctttagaaaccatgcaacacagggaaagagcttgggctgtggattcagatcctgccccctcccacactggctgtgtgaccctggacaagtcctcagcctttgtggcactcagctgtcacatggtggtgagcacactgacagcatgggctgtggtgaagagtgaacaagcttatgccagtcaagtatttcccatggtgcggtgtgtccttagccctcaaacgccagcataaaaaccaggtctacagggaggaagcactcatttgatttcttttcttttgtgattggtgacaactcacacataggcatgcttgcttttcctttctttcattctctcttcttcctcccccgttcacttctctacttcttgttgtgggttttggctttttcttttttttcgagattgcgtctcactctgtcacccaagctggaatgcagtggtgtgatcttggctcaccgcaacctctacctcctgggttcaaacaattcttgtgcctcagcctcctgagtagctgggactataggcatgcaccaccatgcatggctaatttctgtatttttagtagagatggggtttctccatgttggccaggctggtctcaaactcctggcctcaagtgatctgcccacctcagcctcccaaagtgctgggattacaggcgtgagccacaacgccagggcttttttggctgttttttaagttgaggtatagcatacctccaattttaaggtacagtttgatggattttcacaaaatgaacacacctaggcaaacagcaatagaccaagaaatagaccattatcagatctccagagccttgtcttgttaaagggccactgtgctgctttctgataccatagtgtgcttttgcctgtatgtactcctttgtatctggcttctttctctcagcatcacatctgtgagcttcctccatgttgttgcaagtagcaattgttggttcattttcattgctctgtaatagtccattgtgtgaatacaccacagtttatttatcttttactattaatgaatagttcaatgttttctggtctggctcaattacaaatagtgctgtaattaacaattcttacatacttcttctgctggctctgagccctggtttctgtgggatgaaatccttaggaatggacttgctggtcacagggtatgtttatactccactgtagtgcatactgccacacagtgtcccaaagcagccatacggtgatgattttttaaagaaagagaaaaagaatacaaagaataggataccaggcacctgtgttcccaccacaccaaattaacagctgttcacattttatcatatttgcttccaagcacctaaaaaattattaggaaatgtttcaggtgtgccctggaatacacaggaaaatgtaatgaacacacacgtataaccatccagattaatcaatgttaacatttagaaattaaacactgtaaatacagctaaaccctctttgcaccttttctcccagaagggaaccactctgcggaatcattctgtgtccttatattacatatgattatgagagggttttctttttacagcttcacatcaatgatacttattctttatgtagcctttcacaactgctgttcttcaccaatatcacatttcttgagatgtattcatttagatgcagggcattctaatgcattaactgctacacttgccgatagtctatggtgtgactactcagtgttgcatttatgtactctctctttgatgaacatttaggtcgtttgcaatttttccctatttggtcattgtggcattagcatccttgtacacgtcttggtatacatgtttgagactcggtttctctaggttgtgtgcccatgaatgaggttcctggcttataaggtatgcttgtcatcaacttgcctagctcttgccaaattgtactccaagatggcagcaccagtggttcactctcaatcatgggtgagaattcccattgtttcacattcacaacagcacttggctttgttcaacttaaattttatttatatttcaccaacacaatgggtataaaatggtatctcattttgttgctgctgttgtttttttttatgtgacttatttttttttattattatactttaagttttagggtacatgtgcacaacgtgcaggtttgttacatatgtatacatgtgccatgttggtgtgctgcacccattaactcctcatttagcattaggtatatctcctaatgctatccctcccccttcccccaaccccacaacagtccccggtgtgtgatgttccccttcctgtgtccatgtgttctcattgttcaattcccacctataagtgagaacatgcggtgtttggttttctgtccttgtgatagtttgctgagaatggtggtttccagcttcatccatgtctgtacaaaggacacgaactcatcattttttatggctgcatagtattccgtggtgtatatgtgccacattttcttaatccagtctatcgttgttggacattcgggttggttccaagtctttgctattgtgaatagtgccgcaataaacatacgtgtgcgtgtgtctttatagcagcatgatttataatcctttgggtatatacccagtaatgggatggctgggtcagatggtatttccagttctagatccctgaggaatcgccacactgacttccacaatggttgaactagtttacagtcccaccaacagtgtaaaagtgttcctgtttctccacatcctcgccagcacctgttgtttcctgactttttaatgatcgccattctaaatggtgtgagatggtatctcattgtggttttgatttgcatttctctcatggccagtgatgatgagcattttttcatgtgttttttggctgcataaatgtcttcttttgagaagtgtctgttcatatccttcgcccactttttgatggggttgtttgtttttttcttgtaaatttgtttgagttcattgtagatactggatattagccctttgtcagatgagtaggttgcaaaaattttctcccattttgcaggttgcctgttcactctgatggtagtttcttttgctgtgcagaagctctttagtttaattagatcccatttgtcaattttggcttttgttgccattgcttttggtgttttagacatgaagtccttgcccatgcctatgtcctgaatggtaatggctaggttttcttctagggtttttatggttttaggtctaacatgtaagtctttaatgcatcttgaattaatttttgtataaggtgtaaggaagggatccagtttcagctttctacatatggctagccagttttcccagcaccatttattaaatagggaatcctttccccattgcttgtttttgtcaggtttgccaaagatcagatggttgtagatatgcagcattatttctgagggctctgttgtgttccattgatctatatttctgttttggtaccagtaaaatgctgttttggttactgtagccttgtagtatagtttgaagtcaggtagggtgatgcctccagctttgttctttttggcttaggattgacttggcaatgcgggctcttttttggttccatatgaactttaaagtagttttttccaattctgtgaagaaagtcattggtagcttgatggggatggcattgcatctataaattaccttgggcagtatggccgttttcatgatactgattcttcctacccatgaggatggaatgttcttccatttgatggaatgttcctcttttatttccttgagcagtggtttgtagttctccttgaagaggtccttcacatcccttgtaagttggattcctaggtattttattctctttgaagcaattgtgaatgggagttcactcatgatttggctctctgtttgtctgttattggtatataagaatgcttgtgatttttgcacattgattttgtatcctgagactttgctgaagttgcttatcagcttaaggagattttgggctgagacgatggggttttctagatatacaatcatgtcatctgcaaacagggacaatttgacttcttcttttcctaattgaataccctttatttccttctcctgcctgattgccctggccagaacttccaacactatgttgaataggagtggtgagagagggcgttgttgttgttttgagacaaggtctcactcttgcccaggctggactgcagtggcacgatctcggctcactgcaacctccgcttcctgggttcaaatgattgtcctgcctcagcctcccaagtagctgggactataggcgcatgccaccacgcccaactaatttttgtatttttagtagagacggggtttcaccatgttggccagactggttgcaaactcctgacctcagatgatccacccgcctcggcctcccaaaatgctggggttacaggcgtgagccaccgcacccagccctcattttgtttttgattcacattttcccagttaccgataagactgatgatctgctcgtgatttttagccatttggatttcttcttccctttcttgcctttgtgtgtcctttggctatttttcttctggggtatttttcttatttgtttctaggatcattttatgttttctggatgccatcctttgtctacaaagatagagctcccagtgctatgcgaggctcaggtgggaagatcccttgatgcccggagttcaagaccagcctgggcaagacagtgagttcctgtctcaacaacaacagcgaactcttgctgtcccctcattggagtagcaactctggctccattcacactagaccccaccatctctgcgtcctccctgtgcctcctgcgtgcctggcccccgttccctttgcagcccccaaagcattggtgcacacgcttgtttaattgtctccttcctcgctggacttgttttctgggggagcagttccgcatcagactccgcgcactgagagacgggcatggcctcttgcgtcagtggaggctggatttgtgggtattggcatgaaggaacgttgggccgcagattgcattctttcacttgcatccagagtaaacccactccaaagctcctctctccaaaacggggtccagcaagctttaagtgtcctggcagtacagggcccaatctcacttgctgaggagcccatcttctctaccagctcacagccacgttcagcttaaccacccccttggaactttctcatcatttaatttttcagctcttctgccttctgagggaaagtgaagttcttttttgtaatgagttttgaagcttttttgagttaactgcctgatcctcataagctggtgaaaatgggaagtgttttgtgtcacagaggagcctttgatgctggctcttagctctccgctgtgagctgggccgcctttttcctatccgcagaaaataaactagccctgcttcacatcagtggcaccatcttaataagaatggtggctatttattgagtgctaactgcatgccaggcagggtgccaaggactgcctgcgcattctcatttaatctcgtcagtatccctggggccgaggagttagcatccctgcctcacctcatgtgacccctgaagccttcaagctctttcttgcctcaggacctttgcacatgcagttcctttaggatactccatccctcacccttcctggttttctcctctggcaggtctcaatggcaattctttcgttttcttttttcttttttttgagtcttgctctgttgctcaggcctggagcacagtggcatggtctcggctcactgcaccctctacctcccaggttcaagcaatcctcctgcctcatcctcccaagtagttgggattacagacgtgcaccaccacgtccagctagtttatgtatttttagtagagacagggtttcaccatgttgtccaggtctcgaactcctgacctcaagtgatccacccgcctcaacttccccaagtgctgggattacaggtgtgagccaccatgcctggcgtcatctggaattctgtctcctggaagaactgtttctcagctacccagaataagttagttccctccattacatgctttctttctttgccccttatttttttgttttatagcattagcacattttatgaacatagttatttgcttaaacatggtaagtgtgtttgtgtgctggccggcggagccattgaaggattttaaacagggtagtgacaaaatccagtttgtattttggagatatcactgccctgtagaggacagctggatggggtcagtgtggctgggagtctcctgtgaggggaatgtgagagacagaatgtctgcagctggttgggcgtggtggctcacgcctgtaatcccagcactttgggagaccaaggcaggtggatcacttgaggtcaggtgtttgaactggcctggcaaacatggtaaaaccccatgtctactaaaaatacaaaaattagacagatacggtgtcaggtgcctgtaatcccagctggaggctgaggcagtagaatctcatgaactcaggaggtgaaggttttagtgagccgagatcatgccactgcactccagcctgggcgacaggatgagactctgtcaaaaaaaaaatgtctgcaggtttcagtgagcgcagaggtactgagaactgagaggggaatcagcagacatggagacgtggagcctgacttggcagagatggggacttgcagaaaggtcacactcatttgtaggtgactatactatgcagtgtgagcgccctaaaattgtgccttgcacaaagttgtgacacaggggtagtcagctggcaactcacaggtcacattccacccaagtcaggggttgtgtttccgtggtggtggtgatgataagtacgataaacccatgcctgcagctcagggtacacggcctccccagcaagcgaggctggtcttcctctttatctcacgcttcctcgttgcaaccattgtgaggcactcaatggaggctgggcccttcgctggagcacatggtcccaagtcaccagcctgccctgcttctcacacctccttggctctcatggcttttttttttttttttttttttaaacctagtcttgctctgtttcccaggctagagtgcagtggtgcaatctgagttcactgcaacctctgcctcctgggttcaaacagttctcctgcgtcagcctccagagttgctaggattacaggcacctgccaccatgcctggctaatttttgtatttttagtagagacagggtttcaccatgttggccaggccgatctcgaactcctaacctcaagtgatccgcccgcctcggccttctgatggcttttgaatttggttccctgcagggttcggggaagacattttggagcaggtgattttttttcctctgagctttgaataattaagtagacaagggaagagcgtttcagggaggggaaagcatgagcaaagctgcagaagcatgggtaatggacaggttcaggcatgcactcgattcttgatgtccaggtgctcctgcccctcaccactgttgggaaggggtccggagatgagtgtggccttgggtgaagcccaagtgaacaggtagcatggtaatggtaggatccggggccctggactttctcagcagtcgggacctgccctccctgttatctccaggaccaatgacttcagaggactgaacaacaagggctctggggaggacagccacctggctgcaaccaagatcctaaggcatcttaagagttcttggcagaaaggccctgaagtaaaaaagtaaacgaaaagcttcattaatttctagataaacattccttcattttttatttcacaaacctgtattgaatatctatcatacaccaagtctcgtggccttggagacgaataagatacatttcctgccctcagagagttcacagtctcatagggcctccgagtcagtgctatggaggaggttaaattagggtgtgggagcacacgggagagtgtatcatcgtggatgctttctacggcaagtggcaacaccaaagtcaaactatttttaatctaacaagatcatgtattggcttgtgtaacgagaggcttaggaatgacttcaggagtggctggagtcgggagctcagtatcatcagacatctctatcttgaccagtctccttctcttgtatttgctgacatgagaaatcagctgagtcttgcctgttgtatctgttcctgtttttttctctgcctgctttttctcaattggcttccttcttaggcagccacctctctcaaggcaaagatgatcagctgcctcaaggcttccattgtatccactaggcgcctcaggcagaaagagcatattgttttcccagtagtttcagtctcagcactgatgctctgtggcctagcttgagtctcctgcctgtcccaggaccaatcacagcgactgtgattggccaggtcattggttcatccctggatggaggggtggataatttctgtccactctcagacaaggttgattccccaaggaaaggctgtagcactgtcaccaggagaaaaggacatgggtagcaagcaggcaaaatatcaaggggagacagcctgtggggagaagggaaagagagactggggaagggtcagaactgaggtgccaccagaattgagtcttgagggataagcagcattcagctattgaagcagatagacgaattccaggcagaggaaacagcacttctgagagctgagtttatggaacaacgcaacttcctctggcccatgaggcccactgagaagtcagcatgtcccactagcagcaggtacacgtggcagagcatgtgcacgttagcaggtgaggcaaaacagcaaggcagggccagttaccttgtatgcttagctaaggagtttggaattttatcctgaaagcaaaaaaagtggcatggtttttaaaactggtttggcatttaaaaaaaaaatgcttgcttgggaagcagtgtaggggatgaccagtagcaggagacgctgggctagtaaataagtaaatacagagagggctgcgtgcatatcaaggagaacaccatttattcatccattctgcacatctttcatgagcacctactatgtgccagccactgaaaatacagtgggaaattaaacagttaagggctctgtttgcataggcttacaatttttgagtgggaaggagaacagataatgcacacataagcaaacatgtaggtagtctctagtaatctctgaatagcataaaagagattcaactctacatctgtctctaagtcaggtcataggaggcattaacttataaaccaaacagcatagaattttttcaatttgcaaattaaaacaatttttggccactgttgccaacaaaagtaaaattgctcagttctgcttgaaagatgaggatgtaagtagagagatggtaggtttttcagaagctagcagtgaactatcatctaggattgatctgctacttgatagcagaaggggctttgtatgctgggtaatggagccatagctccttttggacagctgcataaatctttttagggagctggaaaaatgagccacccaggcagacctggcattctgcttaattctcatttccacctttcattccttccccttatgccctccgctcattccctcctcctgcagtgggaaatcgcagtagaaggcacaagttagggttctatatgggcattcttcaaactggaacaaccaataaaaaatgtgtttgctctctggggcatttccctcagcagtactgttggtggcaggcaggtcatgcatttcacattgttttggagacttttgcagatgcccccaatgcactgattttggaaataattgaacatcactgttttttgtttgtggtggattaggcttcactgctaagttccaggtgactgacgggggtgccagtaatgccagcacccgagcagggcaagacatagctgcatcttttccagattctcaaggcaagtggtaaaatgaaggcgtcttggggatcctcccttagtctgtgcttaggccacatagctctgcactggtcagcaccaaagacaggtccaccgcagctgtcatttgcctgatggtttcccactctgggtgtgatctgaatcactgggggttaagcatattcacaggatcagaccacaccccagacccggtgaattagaatctctacagtgaaaccccacaatctgcattcatttacttctttatttatttagagatgggatctcactctgtcgcccaggctggagttcggtggcacaatcacggctcacttgcagccttgacctccctgtgctcaggtgattctcccaactcaacctcctgagtacctggggccacagttacgcacaaccatgcctggctaatttttgtatttttttgtagagacagggctttgctatgttgcccaggctggtctcaaactcctgggctcaagggatccacctgcctcagtctcacaaagtgctaggattacaggtatgagccatggtgcccagcctgcatttattttattttaattttaaattttttacagataggatcttgcactgtcacccaggtaggagtacagtggcgtgatcatagcacactgcagcctcaaactcctgggcttaagggatcctcctacctcagcctcctgagcagctggggctacaggcacatgccaccacacctagctaattttttttctgttaatttatgcagcgacaaggtctggctgtgttgcacaggctggtcttgaacttctggactcaagcaaacctcgtgcctcagtctcccaaagtgctaggattataggcatgagccacttctcctggccctgcatttgtgaaaggtccttagataatgctgatggagcttgcctgcagaccaataactgaggaccacccagaaggcggaaataactggccccaggtacacagtgaggtacataggtactcagaaagccagggctgggacttctgacaggagtccgcctctctgtaacctccacgggctccttttgctgtcaaccccatgccgttatgtggatgagcaaagaacacagtggtgaatattttcatgcattggtgccaggctttccagccaaaatgtggcttgagatgaacagtatcaaataagacctcaaagaatgattctacaattttatcatctgtctattctttctcaatatcttaccacttaaaatgtggtctgtgtaccagtgacatcagcctcatctgagagcttgtcggatgtgcagatttcaggccccatcccagacctgctgcatgagaatctgcatgttcacaggcccccaggtgggttgcatacacaagcaagtttgagaagcactgttgtgtgtcatttttgcagttgctatcagattggacccttccagtgagaccctttcctgtctccttcctccccgcctcaccttggtcccctcagtggagggcacctgttgctcacttgtcagattgtcaggctctgagccacgcctgtcatgggcagagtgactgtgtgttatgttgtcatattggggtgtggctgtgtgctgtgttgccctctcaggatgaaacaggaagctcccagctgcaggcaaggctccaggctctcaccgcttctgcctcttcctatgggctcttcattcagatttattcaagaattgtgttcaactataaccccagcactttgggagatcaagacaagaggattggtagaggctaagatttcaaaaccagcctgggcaacatagtgagaccccatccctacaaaaacattaaaaatacaaaaattagctgggtgtggtggtgtgcccctgtaccttcagctacttagaaggctgaggcagaaggattgcttgagattaggagttcaaggcttcagtgagctagggttgcaccactacactccagcctgggtgacagagtgaaacgctatctctttaaaaacaaacaaattatgtttaagacagtggtaggccagacgcggtggctcacacctgtaatcccagcactttgggaggctgaggtgagtggatcacctgaggtcaggagttcaagaccagcctggccaacgtgaggaaacgtcatctctactaaaaatacaaaaattagctgagcatggtgatgcatgcctgtagtcccagctacttgggaggctgaggcaggagaatcacttgaacccgagaggcagaggttccagtgggctaagatcacaccactgtactactccagcctgggtggcagagcaagacactgtctcaaaaaaaaaaaaaaaaaaaaaaaaaaaggcagtggtaaaagatctacatggttcctgccctcatggaattttcagcctagcagagaattttatggttttatttgtttacttattaaacaaataacctgatttagtcccagggtcagttagggccctttacattgagatgtggaggctgtgatccagttaagctaagaagcaacaggcagagtggataccaggggacatgcaggcctgcaccaggccaacactagttatagggtcagggaccttctctctctgactcatgcaggttttactgccactgcaatggaaaggttctagttcttggtgagaacatgggacctgcttagtgtccaggctcaggactgcctccgagctgggcaggcaacatgctccgtccagatgtgcgagacttggaagtgaagctgcaactcaaactagggtctgatgaggcctcctctgggcatttacctcctttgggacagtggcagtgaggggcggtggaggagggcatgggttctggggtcagagtacttgggtttgaatcttgagctagtgtagaccagcatgtcacctcgctgtgcctcagtgtcttcaagtttcaagacggtggcatctcccttacgagggcgctgtgaggattgagtgattcggggaatggcttcagaatgtggccgggcccacagggaatgcttcacagccgccggtggtggtggttgctaggctgaggtaacatttgagatttcctgaccaaaatgccctttgaatgccaccccccaactctgactctcatcagcttccccacggtggccggggcctcattcccagccctgttttacagatagggaaactgaggttcagagtggcctgctctagggctcagcctgatcttctagccaaggaattcttatcctggggtctgaggatgaaattcaagtgattaatggaaaagatttacacttttgttctcagtaccctctacgtgaaacatgaactttaaatgtgaacttagatgacaaattataataggagtaatggtacctcctcctttgtccccagtggaaagcaatcacaggtattttcgtatcacattgcggttgctgcgatgtttccagccatcattaaagctcatggttaaaggtcactactttagaattacaggagcgattagagctgccagtagatcttgttattgaatgtgcctgcaaagaagcactcacgttgctgcatggcagttctgatacctgtgtttaagactatgtgcctttctgccttttttccctaatcccatgtatcttgttttgtgaacttaaaaacatcattctgacaaggggccagtaggcttcattacagccacagggaggaccctcccatccaccacccccacccccagggtcgcctcaactgcacacccccctgcccataccctgctgggtgctgccacccaccactgctgctctgagctgcctcactccttccagttcgtcctccttttccttccctgcgacgttcctttttgtgaagcaggtgctggataaataattaatagggtgggaagaatgtggagagaataacatagctcgtgtttatttttaagcagctgctccaggtgcagtctaggtggggaaagtggttgaggggaggctgctgccgagtggtgggaagaggctttgcagataagcccgtgcactgagaagtcagggtgttggggggcagaatggggctccaggatgggcagcccagggaaggagggtctgtgaccagaacaataagtgggggatgcccagggagtatcaacatttcagtgagaagctgaggaaaactcctagactagcaaagtcgtgagaggaatttgatttctgtgattgaaaagagcagaaatggtgcagcttaaagctggctccagggctggagcgatcccagcagaacggggtctcctcttccttctttccctccttccctctctccgtcactttttttctgtgtaggattcactgtcagagaggctttcttcaaggcagagcctctggcaggcccagacttattatggcaatacccgctgcagaaagagagcttctcctttctaatagtcccagaaacgtcctaagattagattccattgttctgtttgagccatgtgtccattctttttttaaaaaaagttttattaagataaaattcacacaccatacgatttaaccatttaaaatgcacaagtcagtggctcttagtatattcagagttgtgcagccatcaccccaagttttagaaaatttcatcaccaccagaagaaaccctctaccacttggtagtcaccccatcctctcctgccaaaccccagacctcagcccctagcaaccactcatctgttttctgcatctaaggatctccctgttctgaacatttcctatcgatggaatagtataatatgtagtcttttgtgagtggcttcttagcataatattttcaagggtctgtcctgttatagcacataacggaacttcattccttttttaaaagatataattcatgtaccaggtgattcacccctttaaagtctcaaattcagtggtttttagtatatttccagaattgtgcagttatcactaggagcaattttagaatgttttcatcacccggaaagaaactctatatccatacgcagcctctccccatttctccccaacccccagccctaggcaaccactcatctgctttccgtgtctgtaggattgcttgttctggaaatgttgtatacatggaatcatgcactgtgaactcttgtgtgtcacagaaggatcatgtttccatggtgcgtctgtgtcatagcatgtatcagtgcagtaaccccccttatccaaggttttactttctgcagtttcagttacccacagtacagtacagtaagatattttgagagagagaccacactcacattacttttattgtaatatatcgttataattgttctatttgattattgttgttaatctcttactgtgccttatttagaagttagactttgtcataagtatgtatgtataggagaaaagatagtatatataaggtttggtgctatccacagtttcggacatcccctgggggtcttggaatgtatcctgtggataagcgggaccactgtacttcattcctttttattgtcaaataatatttcattgtgtggctatgccatattttgcctattcattcgtcagttggtagacatttgaggtgtttccattttttggcttttgtgaagaatcctaggccgggcacagtggctcatactcctgggaccttgggaggccaagacgggacgatcacttgagctcaggaatttaagaccagcctgggcaacatagtgagactctgtctctacaaaaaatatagaggaaaaaacaaaaagagactcctactgtgaatgtttttgggtggacaaacgtttatcttctttatttcattccatctaggagtggaactgccaggtcatgtggtgtcttagtctgttcaggctgctgtgagagaatatcacaaactgggtggtttacaaataacagaaacttttcattcttctggagactgggaattccaagataaaggtgctagcatattcggtgtctggtgagggcctatttgaaaaaaaaccattgtttccacattgaattttcttggcatccttgtggaaaatcaattgactataaatgtgagagtttatttctagaatttcagttctttttcattgatctaaacatccttatgccagttccttttttaaaaaaacaaatcttattttgtatattcgaggtttgcaacatgatgctgtgggatatgtagagataggaaaatggtcactatagtgaagcagattcgcatagttagctcacgtgcttccttgattactgtggctttgtacaggtagtagctgttggaattgaaaagtatgagtcctccagctttgttctttttcaacattagtttggcttctctgggttccttagtttttatatgaatttttggatcaccttgtcaattctgcaaaaaaaaaaaaaaaaaaaaaaaggcaactgggattttgagaaggaatgacgttgaatctgccagtcaatttgaggagtatcagcatcttcatgatattaagtcttcccagccatgaccatggaattttttctatttaggccttctttatttcttttgatcatattttgtagtttttctatagagtacaggtttcagatttcatttgtttgtttgtttgagacagagtctcgctctgtcacccaggctggagtacagaggtgtgatctcgcctcactgcaacctccgcctcccaggctcaagtgattctcatgcctcagccttctgagtagctgagactacaggtatgtgccagcacacctggctagtttttgtatttttagtagagacggagtttcaccatgttgaccaggctggtcttgaactcctgacctcaggtgatgcgcctgcctcggcctcccaaagtgctgggattacaggcgtgagccaccagcgcctggctagtgtgtccattctcaaaccaatcactgtatccagggggacaacaccctaaaaaaaaagctgggcttgaatcctgcgcctgtccctgtaactggagggcggagtactctgtccccaactacttggtctggaaatgggaagtgggagatgtttgaaaggattattctagtgctcctgacaaggccatgaaggggatgtatgctggacaggcaagagttagaagaagaaaagttatctattataaattgtgagcaccaaagcttcattaaaggcacctcacgtgatacggagggaatagcatcagacttgaaaaggcttttggctatttgattgcccaaaaagaaagaaaagaaagatgaaagaaatcactgagctttctagcattttatctagaggtgatttcttagaatcgtgttcagcaaaggcagcatatcaagggcttaagacaagtcaggcttgagaacatcaactatggtcagggaatggtggtaaagaagacagctgaggaggtggaatctgtctgcctggcctggaaaggttatactaaccacacttccctcccaacccacccaccaaatccagctgaaaccttctcatctttcaaatctctttcctcaggcttgtccttaacgcagtgtgtatctgttttccgatcaccactcatttttgcattcgtttgtctgacaaagctctgaactgcagagcaaagaccatgtcttgtatgcttatcttgtggtggggaaaattattgtactgaacctgtagattattgtgagaattaaatgacctgacaaagatgatgatgatagctaaggtgagctaagtgctcactttgtgttgggcactgcaactattgttatcatccctctttcagaggtgatgagaccgaaatgctttctgaggctgtagacctggtaagtggtgcagccaggattgaagcacagagggtctgactcctggcctgggtcctttcccatcacatcaaagcacttagcacggtgcctggcattgagcaggccctcagtagatgcgagctgctgtttatagtcagagaaggagaagcttgactcctgtctggcgttgctggtatttgtgtgctagccctgtggtcccaggtctggacagtcaatggctaatgcagaatcgaaccctccccaattccgttttccatacatgttggaattgagctagctgctgtaacagatttcaatgccagactctgtttcttgttgatgttactgtttggatgcttgtggttgatgagtggcttgtgtgtagatcccagatctttccatagtgagccttcaccatcccctggggcaagagttaacaaactttttctgcaaagggccagatagtaagctaagagcctgagttgggacatgtctggactgaagctggaatgattcctttttcggccctgattttttactttccttcttatgagaaaactccagaacctttgtctagagtatatagtgctctgaagtagaacgttaaaataacccctttaccttccctccctccccttatccatgtggtttgcattaaactcaaaggtcttgacaggtggcgcttctgtgctctgctgtctcctttctccagttcccagcatggcaccaggcacacggtcaaggccaagtcaagggcttttaattgaatggagcttttgcagacctctcctgtgtaaacaaaggtgcaaatgggacagcagagtagctgggcctggaagccgtgtggacctgggttcaaatcccagctctgacgctagttaacgtggccaagggcaagctaattcatctctgtgagtttcagtgttcttacctgtaaaagggaggtaccgctaccttcttgggaagagtgtttttgaagatacagtagctgccgtattttgagtggtgcctggtgggctgtggcgggtggctattctgtctgtagccgttgtattcacagggaggagtccagagaatcggcaaggtcacgcatccccggccctgctccggagggcgagctgggccccatgcttcccagcgtgtctggattgtttctgtagataggtgcttggccttcagaagcatggaccggtgtcacctctcagtagcacagctcgatgaactgtagcagcggggccgcaacaagcttgcagactgtttttgatggcccattgatttcttttttctgttgcttctggatggcctgtagatatattttgtttgatctgcactgtgatattcaggcatttgaattagctgctagctgatttgagaatggagagatcttgcctaatgatctggatttgcagcttcccttaaaaagcagacagagctggccctgcgagctcctgctctcaaagggctgtggtccgccagagcgtccctcccgctttaccaacgttcctggtgccctctgttaagcctgtggccattgcagtatggaattgtctttggggtgtttgattcactccaggtttcttttatctccaccagctccagggcggggtataaatgccacgccaccttctctctcctggctggctctgaagggtacctgttcctccccagccatgtcctaccctgagggagctttcttggggacacacaatggccaagcagagtggaaagaacatggccctggagtccctacactgtggggtcctggccataatacttatctcctttgagcctcatctgtgaaatgtcgttcaggttggagatagtgtccataagtccctccgctcagttcccggcatccagcacacgttggctggtgctaacattttgtctccattatggtctctctgcccactgagacatttcagcctgtggcctctgcagtgaagaatttatgctggttgtagaggctacaattaaggcagttagaggtagtcccacctaatgccaccactgctgccattaaagcctctgagaatctctaatccagaccctgggtgaccgtcacagttggaatcgagtgtgaagggattcagggcatggggagggcattcactcggtgatcacaagggaagggcaccaggcatgccatctgtcagcccagcgagcccctcagctggtccagggcccacaccacccaagcagttgcttagagggctggggaggcacggggagcggatcccagggaagactgaaatgtagagtgtctgagagcactgggaattcctggttggaattccacagctcagtcttggcttctgaaattattggccttgggagctctttcagggcagaacatgtcggaaccccgtatcctgtctttgggtcccatggaggggtgtcctggcagtaaacaggtgtgggcaagaaaatatctttcctttttgttttttctctttggacctcagatacaaaaatgtgagtgaaaccaagggtagtggcttacacctgtaatcgcagcactttgggaggccaaggtgggaggatggcttcagcccaggagtttgagaccaacctgagcaacatagtgagagcttgcctctcaaaatccatgaaccaatgaatgaatagatccacccctccattccgccacatgagtgaatgccgttcccagctcctggcatgctgtcctcactggtcactctaaagccctgtatttattccctcatgtccctgttctccctgccacaggcagctgctccaatagcctcagcatgtatctgtaaatttgtttccttccagaatatgttgggtgattgcatgtatttttcatttacttcatggcattgtgccgtagtcctcattctttggcttggttcgcccagtgccatgttgcagctccagccatgtgacagtgcatccctgcactctgcctccgggactgttgattctgtttttggagtgtgcattggtgacatctcctttgatgtagcccataccgcccaggacgagaattcctctgggagagatcctctaggtggaattacagggtcatgtattctactgtgtttaatttgaccaaatattgatagattgctccaaaatatggtagttttactgaggggtgtgtgccttgtgctgaagatggatacagggatgaggtggaccgtggaggccctggcagcagatgagagagagtcagggacatctcaacagatgaggccaaactgcataaggaagaggctgggtgtggtggcttaggcctatacaaccagcactttgggaggctgaggcgggtggatcacttgaggtcagagttcgagaccagcctgaccaacatggcgaaaccctgtctctactaaaaagacaaaaattagctgggcgttatggcaccggcctgtagtcccagctacttgggaggttgaggcaggagaatcgctggaaccccggaggcagaggttgcagtgagccgagatggccccactgcactccagcctgggcgacagagtgagactctgtctcaaaaaaaagaaaacaaaacaaaacaagcatgaactagcctttttcctcctctcctcccccaccccccagctgtccagcctgcagtttgcgttggctgcaaagtcaaaagcaaagaaaaaataggctttagctacaatagagcccacagctttcctgccatgggaatcatttgttgtgtcctgctgagggcccatccagcctgtgccaagcaccgtggagggtagaaggagtcatcgcaggtggggtccttcctgtggggagacaggctgccatatccagcccttcttgagcaaaagcactcccccacagagtctcactctgtcgcccaggctggaatgcagtggtgccatttcggctcactgcaacctctgcgtcccgggttcaaggctggggttctgttgagacataaagatgagatttcatccaaccacagatttctcactgtgccaggaggaaagtttttggaactctggtattttggttcaccctatgtgaactgcgggactagttcatttttttatttctgtttttagcaaagccgcaggtctcctgtggtcatgaatgcatgggtcttaagaggcaggacagcctcatactcctgagctcaggtgtggaactcaagcagacgtggctctaagctcagctgggtcaccttagagaagccactgaatctcttggagcctcagtttatgctttgccaaatggggatattactgtctatttcccaaagctgttgcaggggtatgctgagataatggaagcaaacactccacatcgtgcttggcatgtaggaatctggtgataaaggtcctattattgttacgagaaacacgtgtgaggagagtgtaactgggccttcagctccgtgtggagcccttgttcctttcctgaaatagagacatgctttcctccctgtgtttgcagtgaagttttgatttaggcacatcgtcattgtagatgcgcgatcaggttttattttctgttctaacatttagcagtttaatgataccgcgtgaatgctgtggtgtagtctccgagctctttcatgggtattcctctcttgagctgcccagggattggggctatgatctgtcatcccccctcccccgcaactttagagtaagatctcgaaagcaatggggctgagctcaaaacctcgggctgtcccacagcctcctatgggacttgagaacttcagagttcattctaggtggaccaggaaaccactggacggcgttgggcagggcagaggaagtggtcgggccgcatagaagcgactcggttcacagtagctgtgaccgttcactgaggggtgtgtgctttgtgctgggcactgaagatggatacagccgtgaggaggaccctggagggccttgcagcggatgggatgggggagagtcagggatgtctcaacagatgaggccaaactgcagctggttctggcttcgtggtacaggcagcaaccagctgtcccccaggggatgtagggaggcatttgcattggcccctaagattaagtttggggtgtgagcatctccttggtggtgtgaaagtgcccagggagtggagccgtgccaggtgagagggtgcggctggagaggcaggtgggagctggatggtgagggcccttgagtgctctgcagggagcttgaatctccccatcactgtttacgtccatcatggaaggcccagggaaaatatatatatatatatatatatatatatatagttttcggtttttgagacagggtctccctctgttgcccaggctggagtgcagtggtgcgatctcagctcactgcagccttgacctcccatgctcaagtgatctttccacctcccatggggttgttttggagtttgccattgcttcttcacttgactggccccttctcttccgtgggactcatgagcagtactcgagggagacgagcatcccatggatacgcaggcggttgatggattctctctaccatgggtgcctgatggaggctggagtacgtgcatgaaccatagaccgtccgtgctttcagggacaactaggtgctgttcacttctcctcacagggcctggcacagaagtgaagtcaaagagatgtctgcttagatggagaactgaatccgatcccatggactcaatcaatgcctggggagtgagggcgagatggcctctgcagggcgaggcctgtttcctcccctcctccctccttcccagtccgtcaccaaagcacttgtttgggaagtggtggcagagcggagttgctggggtgaaagagtcgatggggccttgcttcccttgtccccccagagggcagtggccctggcctccaaggcagtgtgtccgcagaggcttatgggaggggagtcccaccaagggtgtctttgacatgcatcctgccctgcgtaccccttcctcagttctctcttctcctctctgaccctgccctccctcatcctcccttcctctgaactcctctcccctccctcccatacctttcctccctctcccttgccctgccctactgtgcctgcctttctcctgccctgcttgttttctgtcctcctctcccctccccttcctagtgctccctccccagccctcctgccttgccctcctctccccttctctcccttcccctgcctgccctgccctgccctgctctcttctcctcagccttcctctgccctgccctgctctcccttcccctcccctctactcagttctctttcctcctaccctctcctcttccctgcgctgccttcctctgctctctccttcccttccgtacccttgcaaaacaccttcagctaaagacttcatctctcccctcttctgtccatgcctggtgcgttccaggtggtgatcacctagaaaaaggcctgatgaacaagctgcaggacctgttccagcctctcagccacgccgttgccccgctgattggcccagatgggagcctcaggaccttcctcatgaatatttggggccaagtcccagtataaagattagaacagttttcttttctaaatttgcaattgtattattttccccaaattaatcaggggaggccacttcgtgaagctttgctaacagcgcccagtcagcagctgataaaaggagctctgtgacatttgggaagccaccgctatgagggccaccatgcccgactatttgttgctctcagatgtctctgtggagagtttttaagtggcaataacaggaattgctctcgtcagcttcccaattagcaaccgcacagtgggctccccagaaacaactgctcaggcctgggtgctgggagcccaggcgtcccccgttataaagcagagttcacaggttggcatggatttgccgtggattgcggcttgctccctgcatcccagggtggcaggattgggcctgtggttttgatgagttccacacctcccagctggctaatgcttgaaagaagaaaggcagattttcaatgctccagggataaaacagaggggctttttaaaattgaagactcagagctgttttcagtctcatagaaggaatagctgattctcactctctggcttaaaatgcctgtcactccttggggaaagtccagattctctcatgtggcttcctagggctgccctagctccccctacctcaggcgcctctgctcctgaatcttgtggtccccctaagctactgtctttggcatcttcaggctcctccctgccctggagctgcctttctctcccactgtcgtagagcagagtggatataagggcactggctcaggaatcaggcctcttggggccaattcttgtttctaccccccaactaaggagttgtggacctgggcgcctctgagtatcagcttcattcttctgaaatgggaacatgaaaaagcccctctcttggccagacatggtggctcatgcctgtgatcccagcactttgggaggccaagacgggcaaatcacttgaggccaggagttcgagaccagcctggccaacatggtgaaaccccgtctctagtaaaaatagaaagattagctgggcgtggtggcatgtacctgtaatccctcctactcgggaggctgaggcaggagaatcacttgaaccggggaggtggaggttgcagtgagccgagattgtgccactgcactctagcctggacaacagagcaaaattaggtctctaaaaaacaaagaaagaaagaaagagagagagagagggagagagaaagaaagagagaaagaaagaaagaaagaaagagagaaagaaagaaaaaagcccctctctcgatgggctgctgagaataaatgaaatgatgcttaagcataggtgtgcctagcccagtgcctggcagagaaagcactccaaaaatgttgctagtgacggctcctcctgctgctgctactaataatgatgatggtcattattatgtcacatagtcctgtgggagggctccctaacccccattcagatcaggcaccctgtcctcattctcccctatggaagaccttgtgtagcccttcatcaggcgtgtgttgtggctttgtcacactgttttgtaatgatcgctttgcatgtcttttccagctgactgtaagttccacgaaggcgggatccacaggtctcatttatcttttaactggaagtgcctggctcacagtaggcccccaaagaatgcatgctgaatgaatcaacaaacgaatatatgtgactggagagctgaatgagaggatgaatgattgcaccccatccgcaagtcacccctgaaatagatcagtcagctctgaaatagaactgaaacccattcgcttctccttgcctccccagccgccaccatctcctgcctggatgactgcagcagcatccttgctggcctctctgcttcctgcattgcctcctctgaatcttcaggtgacctccgaagtcacctcctcccaggtgccttcctgtcctagccacccaagccaagtccatctctgtgccagcactctttatgatgtattcacgtatctgcttgttggctctactggatctaagctccggagggcaggggtcacatctgtttgccaatacgttccttcaaggcacggtgccttggacatatgcaggcatgcggcagatagtcactgagtgaaccatgcaggagccagcacaattaacgcgagtgccagtaaccagcctgggcgtaaatctgtaactcgatggtgcaccacgagttaacttctcattcatgtcacagtccactgcagatcaggcagcccctcctttctccacgtgtgggctacatgctcccagagaaaggggaaggggaagcaggggaggggaggatggcagggaatttccttttctcggctaggcctagacgtggcctgccccaactcccattaccttacattaaccataagtcagccgatggctctcgtctaattgcaaggcatgctgggaagcctggtctgtctttgtgcccagaaagaagaaacggggttggtgagccagtctcatcagaatgggtacgagaccaggcgtggtggctcacacctgtgatctcagcactctaggaggctgaggagggaggctcgcttaagcccaggagttcaagacctgcctgggcaacatagtgagaccccgtctctacaaaaactttaaaaattagccagacgtggtggtgtgcacctgtagtcccagctacactggaggctgaggcaggaggattgcttgagcctgggaggtcagggctgcagtgagccatgattgtaccactgcacttcagtcttggcaacagagagatatcccgtctcagaaaaaaaaaaaaaaaaaaaggtgcaggatggaatctcatagccaggaggccttgttgctggagtccttagtagtctagtcaacattctagaattctctagccagtgacaagttcctatatcagctgactccaaagcagatatctcttaagggggctgagctgcctgctactcccgatagacaagacctttttattttacaaaataccttgatgttccttgatgaaaagaaaaagaactttggaaatgcaaaatcacctctgtctgtcacgtagctgacacgaggtgcggctcctggggaggggcccactggggagcgggacatgcgttgcaaagacacacttgtcagaaacaaaccaggaaacaaaattcagggaaatacagggggcggggcctgagcattgcttccaggagcctcgttgtcttgttcacagcattccatcgttttaaaaatagctattcttcatttgatgataactttatcttcttgaagctcaaaataaaattaaccttttctggagggaagaaaaatattcctattaaaattgtctcgagtgttctttttgaaagcgaggcccaactcccagtgccgtctatgaatagctctcaggcatcattgacgatggcgttatggtaggaataccacacagagtgacagcagagccacgggtgggtggcaaggactcattaggcagcccctagagaagtctggcaggttccatacgctgggtttgcctccagtcctgtggcttctcatctgaattttggctgccaccctaggagcccaaccagaaaactcacagatccctcatggccctttaagagctggacattcctcagggggtcagggcccttcctggatgccctgtctcctcctgggagccccatgtgacagatggggcctctgaaggcctagttccctgtcttcactcacttgctccctggtgttcggctctctttggaatcagggagctggcttccaggccagtctgtccactccaccaccagggatctttgttctctctctctggactttcgcaacatcctccaggccattcttcctatggtctgcctggccttccctaattttatcccaacaggtatttgttctctcaacaaatgtgtatggagcctcttgggatctccaggcactgtgataggctccggcgataaagggatgaaccagacagataaggtgcctgccttggtggaattaccatctagcaagggaggtgggggagttagcaagagtcctgcagtgaaggaatgagactatcccaggaagcaacgagtgctttgaagaaaggagaatgaggactggatcagagagggcctgggcgacctccactggcatgtcccgagaggtctctcggaggtattggcacaggagcgaagaccaaaatggcaaggccttctgggacatcccagatgaagacaggagacatcaggagactgtgtgctggacatgagaagaaacttggggctgctaacatattacaatgttggtgagggtcggggtgggaggtactggggagaaggtgacgtgaagagaggttagcaaggcgtgctgcggccacgcggcaaggttcccatgagccacgctagtttagtcgtgtgtgctgggaggtggacagagttcatgggagccattgaagaattccaactgcagagggtcgtgatggagttttgagagctctctctgcctaagcttcctacaccctactgtcccccagcattgcttctcagtgttgatcagatcagctacctgatgcctcccacctcccgttggctttgttcactggtctacgtggctctgcacggttttactgctgctcacactgcagtcttacacctctggagccgctaaacccagccacaccggctgcctcctgttccagcaagccaagctccttctgcctgggggtttcttcttgcatttgctgttctttccacttggcatgcccttcccccaccctcagggcaccaccttgaccacctgatggccacacgcctttcctccaggagccagctaaagcaccagcttcaggggctgcttccttgcagtgacacgctctctccagccctcctgcaaacgtagatattcctccctgcgaggttccctgagcacctgtgggttccatcgcagcacttgccccagcctgtccctaccccctcctgcacatttaaactcctcgaggaaaaggatcccagctaaacatctgtggatcatcagcacctgtcacaggcctggtgggccatgtcagctaccaggtgctgagcctgggttatcaccaatggggtaggagctaccccatcgctgtcttgcagatgagaaacagagattgcaggggatttcgctgcattcccacagagccggtaaatggtactgcaggtctctgacagcctcagggaatgtcaccttgtgatgtgaagtagatgcagtgtagcctctgggatgcatttctggggcctcggctggtcatactgcctgtgcaaggggtataaatcagggcttgcaaatgcactggcccacggaggctgccaggacggggagcaggctgtcctggggagtgacggtgctatgtggtccgctaatcaggcactcccggcttagcccctacccactggcagggctgctcattatttaaagggaagccagaaatctgggttttatgcagaaatctcccggttttaatgtttcaaaacattgctcaggccatacaaaacatacctgtgggtcacagttagtctgtggacctccgtgaacagcttgtggtgaaaatggtggcaccatgtcccccaaaaggtcagaacccaggtgatcgcagggggagtccagtctgaacagtattgcattcaacctattaaagaatggataaagaggtgcactgtaactcgtcttttaaaattccagaagcagcaggcacatttgaaaactcaaacgtttaaacacaggctaggtcttagataacaccaatgagtcatcattaattttgttacaggtgattatgccattgtggtcaaatgggaaaatgttgttaatttttcagaaatacacactgaagtatttaggagtaaaatgtcatgactataatttaccttaaaacaccttagcgaaaaggtaaaaatgatgacacaaatatggaaaagagttaagactttttagacaaagtattgtggagattcattaaaatttgtgctgctttttgtcttatttaaaatttttcagcaatccgtgatgtctcacacctgtaattccagcactttgggaggccgaggcaggtggatcacctgagggcaggagtatcacctgagggcaggagttcgagaccagcctggccaacatggcgaaaccctgtctctgttaaaaatacaaaaattagctaggcatggtggtgtgcccctgtagtcccagctacttgggaggctgaggcaggagaatctcttgaaccagggattgcaccactgcactccagcctgggcgacagagcgagactctgtcccgcctgcaaaaaataaaaataaaaataataataataataataaaaaagtaagaaaacaaaacacagtcacaggcaggaatatagccttccatgaattattctgggatcttccacacctctcaggtcacattctaccgagtcctgtgccgcgattcaggccagggtgtctgcacctctagggtcagagtgagacctgagggaaaagtgcctggggcagaggatgagtcatgcagccccacctgcccctgcacccaggtgtcaggcttcctcctcttcacaaggcagatggcttctcctaaagccaacctggaagtagaatctcaaagaactgaaccccgctttggggaagcctggtgtagaggaacccatgggcttttatttggaaggctgaaagttgtcttctgtactggggaggctgtccctgctgcctgatggaaggccctgctcagccacctcctagtcttgaccctttgtgcaagttcctcacctttctgaaattcagtgaccagccttggctgtgctgtagggacacagggcagggaaatctctgagaaacgagcatgagtgaagatgtcacagacatcaatggataaagaaaatatggtttatatacaccatggaatactatcagccataaaaaaggaacgaaatcatgtcttttgcggcaacttggatgaagcaaaaggccattattctaagtgaagtaactcaggaatggaaaaccgaatcccgtgtgttctcacttataagcgggagcgaagctatgggcatgcaaatacatacagagtgatataatggactttggggactcaggcgtgggggaggttgggagggaggtgagggataaatgaccgcatatttgagtacagtgcacactgctcaggtgaagggggcactagagtttcagaattcaccactaaagaactcgttcaaggccgggtgcagtagctcatgcctgtaatcccagtactttgggacactgaggtgggcggatcacttgaagtcaggagttcgagaacagtcgtcactactaaaaatacaaaaattagccagacatggctgtgtgtgtgcctgtaatcccagctacttgggaggctgaggtaggaggactgcttgaacctgggaggcggaggttgcagtgagctgagatcgtgtcactgcactgcaccctgggcgacagagtgagacactgtctcaaaaaaacaaaaaacaaaaacaaataaaacactcgttcatgtaaccagaaatcacctgtacccgcaaaaattattgaaagaaatcagattttttttttaattccaattgctgccatattggacattcctagagcagaacctggcttaggtttccagggagcagctattgtgaggagtgagcacttgggagggacttgggatttctccaggggcctctgggacctgggtgagagaggcagattagactcatggatggaattctctaaccttcattttgggggtggggggttcactttccttgggctctgtagcaccaccccacatatagtaggaaggagcatctctgatctctccttattgctttagagtgttttgagcatttcccttccaaaaaaagaaaaatcttcacaagtttttgcagggctgatgagctcctttcttgtcttcctgtagcagagtctatcaagctgccttgagggtttcttgtgcagattaaaaactaggcttcatgagctccgttgggcactagccaggcatcttaaccaccttcccaaggaaaagcatctcattgtttaatggcgggttgaaacttggcaaccaaggagcagaaccagcattcagactgggtgagcagaggctccagcttgggttggaggaccctgggacaaccttgtctaaatatcttctctcattcgcacatagcccgcctcctgccagggtgtgagatgttagccaccagctggactgatggtgacattggagtggttctcagcagtgtttgagagctgccacccctctggaggaaggtcccccaccgaggccgctcatcggaggtggctttggagaagaagactgtgttgtgactttggagtggccccgaggggcccctgctggcacagatgctccacgcttccatctcccacctggtgcttgcaagaggcttgctagagaaaatataaggatgcccagtgaaattggaagttcagataaaccaataattttgtagtctaagtgtatcgcaaatactgcatggaaaggtttcgttgtatagaacatactttttgctgaaaaattgttcattgtttatttgaagttcaaatttcactgggtgccgtgtattctcattcgctcaatctgccagccctggctcaaaggtgcctcttaagaaagactcttcttgccatgctcggggccttggcaaggctttgtgggaactcttctcttctttttattctgattttgatttttgatttgtttttattttttagaggcagtgatgtggtttggatctgtgttcctacccaaatctcctgtcgaattgtaatccgcagtgttagaggtggggcctggtgggaggtgactggatcatgggggtggatttcctccttgctgttctcatgacagtgagttctcatgagatctggttgtttaaaagtatgtggcacctcccgcttcactgtcttcctcctgctccggccacgtaagatgtgcctgagtcccctttgccttccaccatgattgtaagttactgaggcatcccccaccatgtttcctgtacagcctgcgaaaccatgagccagttaaacctcttttctgtataaattacccagtctcaggtagttccttatagcagtgtgagaatggactaatatagtcagggtctaactgtctcccagggtggaatgcggtggtgtgatcatagtgcaccgtgcactctacctctcgggcttaagcagtcctcctgctgcagccacccatgtagctgggactacaggtgcacaccaccgtgcccggctacttttttcaattttttatagagattgggccttgttatgttacccaggctggtctcaaactcctgggctcaagcgatgctcctgcctcagcttcctaaggtgctgggattaaaggtgtgtgagccaccacacctggcctgtgggagctcttcaccggggaccagggcacgtgatgctaggtggtttttctcgttgctgacagattgtgactgagcccctgccttgggccagctctgtgcctgcacagggagagcagagacgagtgccccacctgatgtatggggcctcctgggcgaggtaccgaggcccactgcagacagcagtttcctcatctgttacgcgccgtcgtcatagaacattcctcctcgtgttctgtgaggttggaatgaccccgttcctccactgccttctctcagctctttgtttcttcaccttgcttggtcttcggtccagaaggagcatgacggtctcagagaaagccttgtcccggccccgatgctcactgcccagggtgtctttgttacaagccaggggctactagcacagatacacggagcaggattggctatggaatgtgtggggcccaggccaacgtgacagtgtggagcccctggttccaaattaatgagaatggtgggcagtagctcaccacgcagtcccagtgtggaccctctgtgacagcttgggttgcacaccaagcaagctggccctgcccacaaacaccaaccagacacaggggtggggtggggtctgtaggatgagtgagggggttctggatcacagagcccctgatcactgagtggtggaaactgctcagacctggggacctgtgcctgccttctggggccacgctgcacagcccagcctggtatggccctatgggtggggccatgctaccatgcatcctaggttttttttgtgtgtgtgtgagatggagtttcgctcttgttgcccgggctggagtgcaatggtgccatcttggctcaccacagcctctgcctcccgggttcaagtgattgtcctgcctcagccaagtagctgggattacaggaacgtgccactacgcctggctaattttgtatttttagtagagaaacgtggggtttctccaggttggttaggctggtctcaaactcccagcctcaggtgatccgcccgcctctgcatcgtggcccacgcgtcctagtttttcaagagaatacggaaattgtttattaataaaacctctttcttaatcagtggcagttgttttgtatttcgagaaactcccctgaaggcaaaattaagccggtgctctggagtggcatttggtgtgattgataattacccgctgacctgtgtggtcactggattgatttgtgtctccctcgctggcctgtgaactccacgaaggccacagcagtgtgttcattgttctaccctgacccccagcaccacattcggcacattttggtgccccataaataactgtcccatttgaataggaacacaccagatagaggtcttggacctgcttttcctccacttaataataatatcgtgagcatctttcttgttattacatgtgatactacatgtaagggcttagggaccattcatacgagatagttgctcaatcagtgttggttgcctggatggcgctgatgggtgatcgcctgttctatagggtcatttctgaccaggtgaggaagacgtaccaaagcgaagatgttttgtgtttcctcaggatgccaagtttgtggaggaacggagaaagcagctccagaattacctgcgcagcgtcatgaacaaagtcatccagatggtccccgagttcgctgccagccccaagaaggagaccctcatccagctgatgcccttcttcgtgtaagtactgctcccacggacatgggccgccagccctgccagcatttttttctcggtcgttttggaaggtcagggagcacagcggctctccgtgatgccctgatcgccatgggacccaggcgaactccaggggctgttccaggtgccaaagtggaggttgggtctcagcgctttggagcttctaaagggatgggaagagagcaggcctgcaaatgagcattgttgacttgaggctcacaaagaaacttggggctctgtgattttgtactttcacacatttcgatcaagggaagattaattttctgtacagcccacgggtgctccaaaactgaaacaaattgtgtcagtgtttctcaagcttgggtaatgaacccaaggaaagttctcccagactcctaccagtattgacttaaattatttttatatgagttttacttaaaaatgaacattaatattatttaaatgccttcttctctcttgaaaaaagtaaaaaaaaaaaaaaattaaaagagtttacatattatgcacttagaaaatcattacacttcaggctgggcacggtggctcacgcctgtaatcccagcactctgggaggctgaggcgggtggatcacctgaggtcgggagttcgagaccagcatggccaacatgttgaaatcctgtctctactaaaaatacaaaaattagccagccgtgcaaaaattagctgggcatggtggcaggcgcctgtagtcccagctacttgggaggctgaggcaggagaatcacttgaacccaggaggcagaggttgcagtgagctgagattgtgccgctgcactccagcctgggtgacagagcaagactccacgccccccccacccctccccccaaaaaaaagaaaaaatcattacacttcaaaattgtcaattaacccaacggatgctgctgttttcaagaaagctaatcttggctcgaaatgtcatgcagtgacttcttttcgcctgccacatgccaggcgtgctgacttcatccacccctttgctctggtcccattgctgggaaacgtcaggctgtccttttgacgtccctgccttgccactgattagtccactctgttgtcataacctgggaatgctgacatttacatccttggaattaggggaaccaaaaccatcaagcccgacttggtttttatggtcttcagatgctacagaatgtaattgtattatttctaaaatcttaccgtgatagaaacacaaaacgtaaaaatccatagagaagacctgtgggattgggacttattcgagaagcactgttctgggtcggtgtgatttgtatgaaatgctggggtaatataagagtttcctgtcactgtagctgtttaacggttgttctaatggtgttgctgggttcaaaacagagggtgcatttctgctcccctctgtggggtgcacctttgggagccggcttctgtggggtgtgctcctgtctgtggggtgtgcccagcggtaccatccagatcgacatgagcagctgcctgtcttccctgcctaggccctttgaaattgtctccaagatggttgcttagattttctaattgttccggggtttttgtgagaagacattatagtatcctgctgcctgtgataagaggtgcctttttgtcctgaatagaaaacagtttctagaacgctttatttttcttttcttcttttatttgtaatgccagggactggatctcactgtttggaaatggccgcgatagttcacgtgaggagttctcatcctcttagcggcatccccatggcccagggtgcacgggggaattagcctctcgcggagtcatcacgcatcgactgaattccctggtgaaaactgagttagccagttgttcctaagatactcctgatgctgagagtgtgagcaggaggcgctgccccatccgcaagtcagtgtcccccaccccctgcggggtccacagcccaggcatctccggtccagtgtttcccaaacattcgcgtgccgaattgtaaaaagtgcacgttaatgcgagcctgtcggtgtgacatgaatctcagccatgctggttgccatcagtcagcacggagagagaaaccttttgtgcctaattagcacgcagaacagaacacaaggttcgatttatggacttttcaaaacgagaatttcagtgggagactgtggcaaatgacacagtgttgacactggaattttgactacatgttggtctagaccccagttgaaattaaacagctcttttaataaaagctctttggctttcctcactgttccaaatcccacagcccccttctccttcttcctttttgagcaggatgggattacaggtcggaatgtacggattgtttcattttggggtaatgatggatcagccacagccaagccttacccgtgctgacgaatctccatgtgatcgtgtcctttctccatgtgctgcccacagaaagcagcgagactgctgtctcagctggaaagctgagcctgagagatttctggttaaaaaaaaataaaaaataaaaatctcctgcctaaggaaataaacccccaaagcataattattcttataaattttgacagattttctccttggttctttcaaatgttgatttaggatccaaaaagtccatttgagttactgaacgtaaccggattgttcactaaagagagggccccccattttcctgtggatgtcagctttgtgtttcacagcacccatctcatctcgtcttctggagagccaatgaaatctatttcatagtgttgaggaaagtgaggctcaaaggggcgaactggctggtcccggggtccccacccagcacgtggggatcctagggtgtttggcaccatagcccgtgtttttgggatggaggtgggaagcctgcaccctgtggactgagcctgattctccaacttattttatttagccagtatagtggggttttgttttgttatttatttttcttcttcttcttttttttttttttttgagatgaagtctcgctctgtcgcccaaactggagtccagtggcatgatctcggctcactgtaagctctgcctcccaggttcacgccattctcctgcttcagcctcccgagtagctgggactacaggtgcccaccaccatgcctggctattttttttttttatttttagtagagatggggtttcaccgtgttagccaggatggtctcgatctcctgaccccgttattcccccaccttggcctcccaaagtgctgggattacaggtgtgagccaccgcacctggcctgttatttatttttcttaattcaagtacttgccaacatcaaaaaattagaaggtgtcagataaaaaaatccagacgtcaagcttctttattttgagacaagttctcactctgttgcacaggctggagtgcagtggcacaatcttggctcactgcaacctctacctccggttcaagtgattttcccgcctcagcctctgagtagctgggattacaggcatgtgtcaccacgctcagctaatttttgtattttttatagtagagatggggttttgccatgttggccaggctggtctcagactcctgacctcaggtgatccgcgtacctcgacctccgaaagtgctgcaattacaggtgtgagccaccacccccagcctagcttctcttgaaaaatcagaagaattggtcacagcaccattcccccactctcccacacttggatgccccgtgtccactgaacccccatctcctgttgtctcctgggcactgagccagcatcccctccatgctgtttgcctggttatgtcatacatttgggtggatcacctgcctgcatgactacctggctctggagtttgcagtcctggctcttccccactgctcccacggcccctccatttgaatctgtggacatccacgttactcatgatgcattcggtttgcacactgtgccactgtgtgttctgtgaacagggccactgatcagcttcaggaatggtggtcccattctggtttgggaactgagaaggtgggcaggaaagataaaaaccagtgggtagaaattgcttgtgtttttcctcacaaatattacttaaaactttcagtccagtattagatggaacctgctttcacacacactcttccatttttaaattccatttgacgtgtccatatttcactgtgttctgtaagaggcatcatgacttctaagtaatctgccatctgcacaaatctgagttgaagaatcggcaggttgagtttttcctcccagtctctgtgcctcccgttgcctcccttgctaatgccagctctgaattggaaagtaggccggtgggaagtggggcatttcttttctattttgaactctgtatatcagtgtggcccaggggggaccagagtctactccccaagacaaggaacagatgagtgccagcctcccaacacccacatctttgggaagccccgtgctgtgttcgtcgtctgacatttggggaaggggtggttactaagagacgtgacactttgcagatggcagagatccccggggagatgtgaggtaccgttcgtggagggaggctcggactccaagaattcgctcagtgagactggaccgcaaatcggtgacagcttcagtgatttgccgtgctgtcatttagcgcattattaaaatggttttctgcagagtaatttaactttgggaaatacattatgttctcctgctccttgaggagagagaaagttagggggctggaaggtggcagagtaatgtaggtcacagcacaaattcccaactggattttcagcagaaaacccagtctgggtttcccccgccgccgcccccatttgctgctgcattctctcttagggttgtgaaatatatccattttttgctgaaatatgagctgccttgttctcccagtgagcaggttacgtttagctcagcgatgccacaccctgacctgtgcactgccaggggtcacttgaacctaagctgctttgcaagtcactgctaacaggaagtagcaacttttgacttcccttgttttgtggactggccagaaccttccagactccaaagtcctcagcgttacccagttgccagtaaggagtggtgatgccatgcaagagatctcaaagctgcaggcatattggttaggtgtgtgttcagtaaagtgtccatgcatgtgactttccatgggcaagtgtgtcccagttcggcaccgttccaactactccctcttgcttttccccttggcctgctctgctgacttacatcaaccacttggccctctaaggcaggtgagtttgagacccctggtagccacatagaaagtgcggtgttgattttggagttgctgatagtctttggctcttccactgaggaggaaagtggtcttttaggagcttttagaacagcgcatcacacatagtaagcactgtatgtgtgtcactgtttgtaccaacagacagggagcctcggggaaggagattgtggggagcagatattttagggaaagtgatgaagttctagtgtggaaaaaccctaaaacactacagaaagaagatgaggaagtaaacagcacccaccccatgcacacctacccttgcactcactgtcaagtcttttgtgtaactgcagaaatcatcaatatttatgtaagtcaaagagaaactccactgttctgaaatttgccttcgttttttttttgttttttgttttttttggtggggaacagttgcgctcttgtcgcccaggctagagtgcagtggcgcaatctcagctcactgcaatttccctcttctgggttcaagcgattctcctgcctcagctttctgagtagctggaattacaagcggccgctaccatgcccagctaatttttgtatttttagtagagacggggtttcttcatgttggccaggagtgtctcaaactcctgacctccagtgatccacccgccttggcctcccaaagtgctgggattacaggcgtgagccaccgtgcctggccacctttcttaatttaataaaactggctcagtccttctgaaaggtaatagtatccaccgtaatggctgtttcataatttatttcacccttgctctacttgaacagttaagaggtttccagatttttctcccccagactgtagtctggaacatctcgatggatacacattttggcaggtagagctacaggcttgatgtgtagaagccattctggcttagagggtatgtgcattttaaatttttcctgacatcactaaagcccaccctctcataccaatttgatatgcagggtttgatctggatcgaaggggaagccactcttcccaggtgtgcagaacagctgcaagaagcagggagccccaagtcatcccctgtgcctggagaacagggcacttggccctatggtcagggcgcactgggacctggggtggaagtcttggtctctgggggctggagccctggcaggtgtgtgaactcagggctgtgctttccgaagagcacgccaggactgggtatagtggatggattgggcgatgggctagggtgccctcaaaatgttgcagacagaaggcagggagggcctgacccagatggccaagaggaaagggggacatgggtttggaaggccctaccaagaggggacgtggggccccactgtctcaggtgtgcagcaccatctgccccgtggtcctcatggcaagggggcagcagcggcattgccattctctgggatgaggacggtgagagttgagtaggtgactaggctgcctgctggggcaatggaaggggagcagcagaagatgccgagttttgaggctgaatatctgggtgcagagaggtcaaggggacaaggaggggaagcccgcttgggagcagatgagatgaaaaggaagcattggggtcagaaactggtctacgtgcatcctgaaggcaggcccagagccaggcgagggcagagtgaacgtcttctaggatggccgcctgtgagctgccttcaggtagcagtttctcccaggcatgcctcaggaaatgtatgtcttctcccctctcacgtcacaagaaaaaccagtcaagaggtcggagagtgtgttataaccgtcctgctgaaaattaagatgtagcaatcacagtttggaggaatccacagcgacagaggagaggcaggagcaggaggtgtcaccacatggagctgcaggtctgggtcgccgtttacaggaaccaggacaggaacatgtgggagagacgtggtcacgatctcattagtcaggattgccttgcactgatgccatgctgtaactgtgtgttcctggctctgtctactgcaaacaatgaatcattcttgcaaataaatactaatatgtttatgtaaattgtgtactttctgtgagtggcattccaagaagtaaaaagttttggaagcacaataagtccttaaattggcattctggacaccagactctgtagcgtcatgagccttgctagcaggtgcctgtgttgtgtggttctttcagcagctcccagcagcgttcacttgtgtttcccagcgtttgtatattcattctaggctgtcgtgttttgtaaatcctactaagctcaatattattaagcaaacagttttagatgtctatgataatggataagtagtgggaaggatgttagtaatagtttaagaataacttatgatttggagaattcctaagaacttgcaggaattctgacttcaccatctgaaatcccagtctgtctgaggtatttggaaacactctttgggatgcgatttcctgatataaaacgtggaattggctgacatatgggggatcacagaggttacgaagtcagggtcaggtgcccagggaaagagagggcaggaagaggtgttggccttggatggaagctggggacagggcaggagcctggagtccatggggcagaggcaggaggaggtgcgaaagctgaagacagcctggtcagcctagcgaggggagccagtgtctcccagagaagccttcccctgcgtgagagagctgcagaatcaacacctagccccagagcgttaagaacagcaggccgtcctcctctgctgccaagttggctgcggacccagggagcgggtggcgcagcacggctgtggtggcatccctgagcccctcgtctgtggggagagtgccaccaacaagtcatcaagggcaggaaggggaaacgatggtgcctttgcaagccacagcccacatcacacctccggggagggacaggttcaactcgacagctctgcttagaaacacggccgcctttgccaggcagggcctctctctgaacaaactggattctggaaccagcagccatctgaggccacagaggacactttgctgctgttttgcccaaagggcagctgattctcctgtggagtgctttgcagaatccgtagcagcttcctggaaagtcagccctagtcactgttcgtgggctggtacctgtggccctgtgggtcctgggatagcttagatgctaagaggctgtttgaggtcatggagtctttcgccccttttgtgatgtgttgatgcatatttccaccccacaggaggtgagacactaatgttgcacctccccacccccatccccagcagtggggttcctggacagacttgtcacatcagagagcagcccgtcagccactgcagccttttgtcctcatttcttactttcttagcctcgtcattatcaaccaggtatattatttggagggaggagacaccccgctacctggactgataccccaaattggggccttggttctgtgatcttccagcatcaataggcaccccaaatttacctctgtcgactggatgccttggcaaactcaggtgcctgtaggtctgggtgggtcatataagtgaattaagccattgagttgtcagcagggagtggtgtggagtgcagctcataggccccatcaaaagggatcagccactcctcaccaggctgattcctgttatataggactgcagctagctggatagaagtccttgaccttttcaagacgtggcagaaatgcacatcttcatataaaatctgatgtttaagttggttggaaactcctttgtttgcttaaaacatctgtgggccacatggggtccactgtaccttaaaagccttccagggcaaaaggggactttggtgcataagtctgtttaacatgtgaagcagtgcagagtgagggcagcaggggatcccacttgaccccaggggatcgcgatgacaaggtgctaaccaggacagctccaacaccaggcctcagggcagcgcggcctctgcggttctgactgaggtcttcataagagtgtgggctccatgagaaagggtccattggagtaatcgtcgggctagagatgtctgctcagtgcccaagcaccgccggcacacctgccgtctttctccgtgtgggagacgtgctcctaatgagggcctctgtgcccagccaaatgtcctggtctttggagaggtttcctgcacctctgacaccttctctgtggcagcttcttttgcttcttgtcctctgtgtagccagcggctgcactcggttgcctgtagaaagaacgcagattagggaggctttggtttttgttttcggggtttgttttgcttttagcagctcagcaagaaaagtgggtctttggagggcagttgtgtcagttcagggaaattggtcacaggttattagggttgaaaaagaagtctggtattctcacctgttaaattcaaaaagcaaattccattcatgggtaaaattcacctgaaggagttccctgcagacgggctgtcggaggacctttgattctgcttttcttggcgttgccactcccctgtcactcactgccccttgccctactaaacccaagtggctttctttctgcgtctacccctctggtttttaactaagggcaattttgccttactccccagttccaggcacagctgggagtgaatgcagacatttttgattgtcccaaccatgggggacagtgccacgagaatctagtgggtagaggcaagggatgtactgagcatcctacacctcacaggatggcctcctccctgcacagcagagttatctgacctgaacgtcattagtgtgaaggttgagaagcccagacctggcctgagaagctggctcgttgggtcttataaaaccagctacaaagcactgggactccacagtcaagaaaaagagagagggaggagaaaccaacatgtatttagcacccgccagggtccaggtattaggccaggagcttttcatttctttgagacagagtctcactctgtcaccaaggctggagtgcagtggtgtgatttcagctcactgcaacctctgcctcctgggctcaagcgacttttgtgcttcagcctcccaagtagctgggattacaggcatgtgccaccatgcccagctaatttttgtatttttagtagagatgaggtttcgtgttggccaggctggtctcgaactcctggcctcaagtgattcacccatctcggcctcccaaagtgctgggattacatgagccactgcgcctggccagcttttcatttattaacacatcctttctttgaggttagtgttactgtcccttttttccagatgaggaaactgagtctcacagagtgaagtggccaagccatagtctcacagctgggacgtggcagcatggggagtgtgagctgggtatgcacgattggcaagcctctaccctttgtcactgtcagtcacaccaacatgaagcacttacagagcagtcttgaatatcttcagggctggggctttccaggtcctgcattgtaactgtgggtcctctgtgccccttgtaaacaaagccaggcttggtcacgctcgtcttccaccactgtgtgtctcctctggaggtcctcagagtatagaggccgcagccactgtgtaagccttgccgccactttggcctctcagtgcttagatcggccatgggagccctattggtgctgtccaaggtcctacccatctccccttctttgaggttaattgaagaaagggctagaaaatggggctggggagggttaaggaacttctgagagctttgaccccggctgagaaaaggggtctttgatacctgttcgacacgcactcggagctatcccgttcctaatttgattgcccatgagctgagccctttgtcttcattcatctaacacacccaggatgttttgcctggaccagagagaagggtgaacacagcccagctttggtgctggcactcgcctgtgagcgcagaatctcctggcttagcacacatcactcagaagataaaggaggttacggcttgctgagtaagaacaggatttcatgtttttttcttttttatgcatgagaacttgctgtgacagagttgaggatgtttttctcactagctcgttctgggaagacaggttgagaaattactaatgcagcaggaaacaagccgtactgtcagggttgggggtaaagcttgtttatgactttcacattaaaggtacaagcagaatggcctcatcagtaaggagggcggcagttgtgcaggcttgggtttgactcaaggctatgccgtttactttatcagtgatcctggattagaacctttagggacttcatgcctctattttcccctctgtaaaatgggactaattatagcccctacctcagagagttgcagagttcacacctagcacagagaacgcactaactagtttggctgtggctgcagcaggggtgtatacagctaatttctgggttccttagatccagggaagagctggtattaagaggtgttcagggggctggacgtggtggctcacgcctgtaatctcaacactttgggaggtcaaggcaggcggatcaggaggccaggagtttcagaccagcctggccaacatggtaaaaccccatctctattaaaactgcaaaaattagccaggcatggtggtgcacacctgtaattgtagctacttgggaggctgaggcaagataatcgcttgagcccgggaggtggaggttgcagtgagccgagatcacagcactgcactccagcctaggcgacagagtgagagagaacccgtcttaaaaaaataaaataaaaagagttgttcagggcatgggggccgggggagcacacagcaagcacattcactgagcatatttaggagacgatgtagatttatccatgtatctccacccacggtcagtccctttcctcccagctgttggtgaaatggatctcagaggctgggactctgggatcttgttagcataaagatgccatccccctggccagcccctaaattgctgagcttagagaccagactgcaaggtgccaggcacacccaaaataatgtaccttcttttcacctcaggaaactggttagtgtggtacatgtttggattttagtatagtggctaagccaaagctctgttagtaaattcctacaggagctcattggcaacttggtgcatgacagaaagagcaagactttgagccaaacagacctgggctcaaattccagctcaactacatagcagccttgtgaacttcacctctgcctcagcatcctcatctataaaattggtgatagtggcagagatttcacaggcttgttgggaggattaaaggaaatattacctactatggagcttctcgaagggaagcaattttgactttgtttttacttctttgttcaaactctcacttcagtcccaaaatgattgagttggcagcttagatattattacagttgtttgccctacttcatgtcttttttaaacattggagcatctgaaacttcactttggaaaaagggaagcagagtaggtatttttggcacaatgacctctatcctatgtggggtttgtttaaacaaaaaaaagtaataaaatatctcctatatcagagaggtgtgtccacagcatataagaagttgtctggctgggcatggtggctcacgcttatagtcccagctttttgggaggctaaggcaggagagtcactggaacccaggaggcagaggttgcagtgagctgagatcgtgccactgcactccagcctgggcaatagagcaaaactccgtttcaaaaaaaaaaaaaaaaaattgtctgccatttatagaccaaaatcgtcctgtcctgctaaagtataatcgatcttggtgacagctttcttctcagtgggctaagcaaattcacagctttctgcatttccccttgcatttttttatttttgagacggagtctcactctgtcacccagaatagagtgcagtggtgtgatctaggctcaccgcaagctctgtgttctgggttcatgccattcttgtgcctcagtctccctagtagctgggattacagggatctgccaccacacctggctaattttgtatttttgttttttagtagagagggggtttcaccatgttagccaggatggtctcggtcttccaaagtgctgacattacaggcgtgagccaccgcgcccggcctccccttgcacttttaaaatgatgtctgggagtaataactgagaatggttacttggtttggttatcacgtatctcctatgttgatgctgtgtaacatacatctatgatactttgttggtatgtgataacatattgcttatgcgtgaggtgatgggctaggaggcttaactggtcttagctgagctggcttctgtgtctgggaatcagtaggtggatgcaggagggccttgactaggaagaatggaaaaactgggctgtgaaacagaaagatccacagatctttcaccctcctcccaggaccagtgggccagcctgggcatgtacatcagggagcacagacaggagaagcacacccatatgggtatcatccaagctgtgagcatgtcacatcgccaagggggattacaaggcagaaaccagagtcagtgggagggcactgcaaagtcacgtggcaaagaggggcacagagaacggtagatggggccatttgtacacttgcacagattaatgacctgttctaagtgggagaaagggtggctgtgggcatgtagcagtgctgtgaaatgctaaggcaagtgatataaatagggagaagatagaacagaccagtaattcgagccaaaaccatccatgaatccagaatggggcccagaaagacatcactgtgtattctgggatagggccaagtttaatagattgcccagagtcctacttgcctttactttcacaaaaaatttttaatttacacagtgcaattgacttttgctcttgttcatgtctgtgaatttaaacacatgcatagatttgagtaaccaccatcaccgtcaagatatagaccagttccttcaccctaaaaagctgttttcccctcatttcctttctagctgcaccctcccccacctctaagcccttgtccctccccctctagttttgtcttttcaagaatgtcacataaatggaatcatactgtaagcaacctcttgaggctggcgtctttcagcatgtgtgagaaccgtcaagtcgttgggtgagtcagcagtgtttttattactgagcagagtttggttaaatggatataccacggtttatctagtcataaaggaataaagttgcgttggttccagttgttggcaattttgaatagagctagtggaaacattcaagtgcagctttttgtgtgaacaaaagttttcatttctgtgcggcaaatacctaagagttgaggactggatcctatgctaaatgtaagaaactgcattcccacagcgtatgaggggcccagttgctctgcaccctgggcagcatgtcatactgtcatgattctttactgtggctgttcacaaggatgcagaatatttcatcatggtcttaatttgcattttcctaatgagtaatgatgttgagcatattttcatgtggatgttttcctttaacacatcctctttggggaagtaagtaagtgtccaagtattttgcctgttcttagaaactaggctgtttgtggttttacaaagatttgagttttgggagttctttgtatatgttagatgcaagacctttgtcgaacatgtgagttgcacatattttcttctagtcttcagcttcttttcagtgtcttttgcatgacacctttttaattttgatgaaatttactttttgtgtcccagatcatgcttttggtgtcatgtctaccaattgttagcctaaacccaggtcataaagattttctcctaggttttcctcaaagttttatagctttacattttagatctgcgattcattttgagtggacttttgtgtcaggtccaaggattgggtcaaggttaacctacttcctgtggctgacccgctccccccacccccagcgtaaggtcaagtggagggaggacaggactagaggcattacggggtggccccaccctcttgggaccacagctcttatgattaaagaggaacgttatcccctgtattaatttcttattgttgccctaccaaattggcacaaagttagtggctaaaaactacagatttattctccagctgctgtggaggccagaagtccgagatccgtcttactaggctacagtcaaggtgtcggcagggctggcgccttctcgaggttgtggggcagaatttgtttcgcggcttcctggcagccaccctatgccatggccccttctttgcttcccagcaattactctgggaccctgagattccatggggtggacctaaagagtccaggatcatctccccatctcaaaagcctgaatgtaaccacagctgctggtccctcttgttgtagaagctcacatatgaagatgctccagggatgaagagctgggcatccttggggcaccattgatcttaccgccacctcccctagagtgtcaggtgcttgaggactgctcaaggctgaggcatgagagaaggggcaaaaagaaacaagatcgcctccaccctttctgagcaggagtgcccttttccacttctggacccagagctggagggcttctctgagagccctgtctgttcaccccctgcccacttttggggtcaggctgcctgtagttcaggctggaggatgctacaggggaaaaatggtgagctcactgcgggtttcctgggacagcaacaactggtcatctctgtagtctggctgctatttagtttcctgagttattgactagctgcctcatgcatccactccaggtttgaaagctgacttggaggggagacacagggggaggtgaccttactacatcatacccagacctggaacctcttcctcagtattgtctatcctgaagtattatggaatattggtgcatggagagaaggactatggaaccatgtatcatatcttatcagggagagaatgacaggagcaggggaataccactaacagtggggatggtcagccctgatggaggacttctgagtgccagaattaccttcttcattcttcacagaattccctatgagggcagttaccatgtgcaggctcattgtacagataaagaaactgaggctcatggaaggtcatcaatgtctcaaaggacccacgcttagtgcttgatggagccaggatctcagacccagacctctgtgatctgagtcccaagtcataaccatttcagcatgtagttgttcatcagcctcccttttcaagctgccaaattgctctccatgccagacctcaaccctgaggtcacactctgggccacatctctgtcggggtccatcgcatcttcgttcagccagctcctaatgcagccgtgctgacacccgtttaccactaccctggggcgggagtgggttcctgattcctgtcacctcctgtcttttccgtactgtgccagccagtgcctgatactgacctgcgtttccaaccccctggaatggaaaggttcagagggcaggaaccaagctcgcctcttcccctcttctcccagctttgtagcacatgcctggaaaccagtcaatgcttgatgaatgtttatgatgatgcaacagatgttttccactgattgcccacggtacatcctgggcccacacaagaggacgctggatccacttcagagacttggcttgtcttatgagtccagaagggctcacgtttgcagcaccgctctgttttttctttttttaattagtttggcaaagatattcctagtcaccagttagtccaaatcctgcaatattgtctcttcccaacggatccctaaattgagccagcatttccaattcagcccacgctacctgggctcctgctgggtgtcaggccctgtgctaagccttttccacacagggtgtcaaggaatctgcaactcagagggataggacctagtgttattccctttatagatgaggaaattgaggcatggagaaatggaggaacttgcccaagatcacagctagtaagttttagagctgctgttagagcaagagattgtctcaaaagaaaaagttagacccaagttctatcacccagggtggagtacagtggcacagtctcccctcactacagccttcgcctcccaagttcaattttgtttcctcagcttcccaagtagctgggattacagggacccactaccacacctggctcatttttgtatttttaggagaggcagggtttcaccacgttggccaggctgatcttgaactcctgacctcaagtgatccacccgcctcagcctcccaaagtgctgggattacaggcgtgagccacggcacccagtgtgggtctaacacttaaacttgtgtttgaaggcagcgtgttgggaacatggactttggggccaggctggtgttggtcccagtcttttactcttaaatcttgtgcatataagcactagactatcactgccttttttttttttttaaacaaagtattagttaaatcagcaagtaagtgaagttaaagcatcctgtaaggtgtgtggacccatgagcagtactcagaaatgctaaatgtctgagtctctagaagtcccagaaacatgatttgagtagggaatctttgcttagcaaaactatagagccctacttcaaattagcttgaagcagaaaagaagtacttactactcctgtaactatgaagtccagggacttggctagcttcaggaatggctggatccagaggctcaaaaagtgtcaccaggaccctgttggtttcaccctcaagcatgttctgtctggtggaaagatggatcctggcagctgcgtatcttatagatggtttagatccaggccctgaagcataagtgttctcatcagctcctgtagaagtcctaggaaaaatcatattcatcacgttgctcctgatagctgtagcggaaattctagagattctgaatgatgcagctctgggtcatcagcgcatgcatctgggtccgtgcctgtggcccggggaatggagcaccttgattagccaaatctggggcagaggagcagggtgttcagcccacctaagctcatggactgaacatgattatccagaaggagggggcccgattcactgaaaggagagaaagtgggtgggcaaacatatgttcatgctgcggggtctggtgaacagctgtcagtaaagccacagccacctgtgctggcgagtcattgtgtaagaagcttgtgacacctttggcccagacttccacgcccactgagccacgagatcacgcttccgtggtgcgtcccagttcatcctccccgatggagtgggcagtgccccagtgctccgcagctggtgccgtctgtctccagacgctcttccagcctgcattcaacaagccagtcgtatcagaaaatattaaccacgggaattaatgaattttggcattgcagtggagttgactgggggagattttccaagtttattttccaagatgtatctggtgctctagagatttctcccagcccatgagacagggacaccttcgtatttggaagagagaagccagtggtggaacatcctcttaccacactacaagagcttgcgtattccttcatcctggattgccgaaggtggaatccggcaccctctcgttctaagcgaggagcctatctgctgggagaaatggtctcagccaaggtcacaccatgggttaaatgcaaaagccctggactctagaccccgttgactcatcacattgcaaagccacaggaatcacattggtaggggtacaggtctttctgcagacttggttgtggaaggctgttaaggaaaacaagtccataaccctatattcaccggcatcattcctaagaacacgggatgggaatcggtggtgtgcacatcagccaaggcttcagaaccgtgacagccggttcctcaccacaccaagattgaaactaacttacccagattgcaactcaggactttacactctcagtacggcatccaggccacaggggaaggtggaccccaaagtcatgaggcaggaaaagtcagtactgttggaaaggagaagtgatgctggggagtggaaggcgttgtgaggtggttctgctaaaacattatgtcagctggtgggatttggacgtttctctttctctaccctatctcattctgaagaggccgattttatgattggggtcggctggggtctagatggcatttttctgtggggaattgtgtggcctaggaacattctctggaatgttacagtgatggattcattgttctgcaggcatttcttaatgagttgtcactcctgactctgcgtcatgccttgggatcggcaggttcatgtcagactgtttacttctcatgaagcctttgagagcgctgtcactcgaattctcttcctccaccatccctttaataggaggggaaacctcggcccagagaggtgaagggacgtgctctgggtcgcacagctggtaaactgcagagccaggattctagagaccaaactcttgaccactgcttcagcaagaactccttggggaaatgcccacatgcagccagtgtcaacacagcccctggcctgtggtcagtgggccagtaatcaatagtcattagatgttatcatcatcccttggtcactgtatttccagatgaggaaacaggctcagagagattgagtaacttgtcctaggtggcacagctaggaagcagcagatgtcggcttcagtagccaggtctgtgaggccctgctcctgtagcatagccacgaaatgcactgtgccagccatcagacccaggctgcagtagccagctctgtgaggccccacttacctagcacagctatgaagtacagacactctgccagccgtcagagaaacaaatatggtcaatacaaaaaaggaaggggtggggcaggcaatgacagggaaagggcctctgttctcaagtggctccaaagagtactgttgagaaattggtttgccacttcgccctctttacatctggaagactcgcatccaccagagaaagggtgtcacatagttccaagtacatacagagtgacaacccattgtcacacaataggtgtattgtccgcttcctaaccgggtcctgcctggccccacccctaggattgttccttccagggcttgtggacggataggatgccagtgactctcctcctgcaactgtggcaagaccgtgtgtcctgtcagagtgggtgaccagggcctttgccagcagacgacttatggagaaacgtttgagtagatggaggaacccatttcctctggaatccagaggtacagaaagcaagggtctggctcttttcttctgttctgagtctacactatggcccttcccagcttctaggctccaggttaaggggagtggctggtgcaaggtgggtggccagagacgaggtccccatgaagccttcagattttaacctgagatggagaggcagcttttaaacagtacctttcaccactaggcatacaggggcctccctactgactctccagacctgtgggggaggggagcggatcacctctccttgagagggtgagcctaagccgtgggcattggggtggggtacctggagcattctaggtgttcggggctattaatatttatgtattattctgacaactaagggcaggatgtgtgcttcagtgggcactgtagtttgaacacctggatgccaaaaacagaaaacaaaaaaacccacacccttgagtacacatgatgggagtgaagcagtcctgggtttgagtccccagtctctcacttcactgtgtgactttggacaatgtattctccccatccacaaaacagagctaataacctccacctggtaacatagggatgggcactggtgcagggaatgtaaagtaacgagggacgtaggaggtactcattgctgtagaggtaaacttgacctcttttcgacccttcgtacaactgtattagtccgttttcacagtgctgataaagacatacctgagactgtgcaatttacagaaagaaggtttaatggactcacagttccatgtggctggggaggcctcacaatcaccgtggaaggcaaggagcaagtcacttcttaagctctttgcatggcaccatcgatgtgagctaggaaactcttccctatgaaaccatcacattcactgtcagaagaacagcacaggaaagactcgcccctgtgattcaattatctcccaatgggtccctcccatgatacatgggaattcaagatgacacatggtttggctgtgtccccacccaaggataatacaggtggaacataaatgccagattgatctattgataattataaacaattaccaagaagagtggataaatcttcctttttgaatccatctagacccactgtgattaaagctattattttgactagaaaactaagaagataggagaaaattagacatttaaacagctaccttccatgcaacaattaaaggaaattttaaatacagacaattaggattgctttcaaaatatatgaaaataaagggattaagattatacagtcaccagtaagatcaggctggtttggtttttccagggctaggagtgcagctggaagccctaggaggatgagagcagggatgaagagaaaataaattccccacccctccatccacccattcctccaattagtacttacagtgcaccatttcagatcctgatagttcaacagcagataaagcatctgttttcatgggggacacagacattgaatagtgaggcagacatgcctatgtgaggtggcgatttccagtgaaaagacaggaaatgacatcacagtcatcacagagggaaagaagcctgctggggatgtgctgtttatggtctaggaagatgacagggatagtttgacccgaagtggagacctgaggcagggagccaggcagtggacacagcaggtgcaaaggtcctgcagccttgaagacttggcccctgggagaaacagcaaggaagccagggtagcccaggaacagagaggccttgcagccaagggaactctagctgccatgtggagtcagcaaagggtagagctttgttatgggtgatagaacaggtagttaggggaccatgtgggcaccccggggagaggggatggtgcctcaggcagcctgggaaggggtattctcaaagtagaactaccagaacttgctggtttcaatgtgggtgtgagagaaagaggaactggaagaacagagtcctgagctgtggttaacatccccctccctcacgaggattaaatacacccccacgaagtcagcctcagcaccactaagctgtcccatgggatggagatatgattcccaccccaagcaccatctcctgtaataaaacctggcccccgcgttcctgtctgggatctgcatagcatggcacccatcactgcccctctaagcctcctcctgtgaagctgcagctgctcacacttgcctggctaccgaacagaatgggctcaagaatgctctgcagggacagccttactgagccccagattccaaactggagtttagcaaaatgagccacttccttcagcagcagttctagggctgtataggagctgctcttaggggttcagggatacctcaattcccagtctgccctcaaggtgctcagtcttttgggagacagcatggcacaggggtctcgagtgaacgtggcatcctggacttttgcactgctcatattggtaaggcaagcaccacccctggcacacacacggtcaggcatgacataaaaagatgttgctaagggacattgaggtctatttcttgggacaagtaggaattttctatccctgttcattcttcatcttggccacacacatttgctctcttgctcatcccacagcgcctcccacaaggccacgctggatcctgccacagtgttaggttacatttccttccttctggctcaccagatgtggacctgactgggaaggctggaagctactgtccctggagccctactctcctggcttggtgcctccatggggaatgacagtgggcactctgcacccacatggaagggagtcccacaccttctaaggtctcctttgtaacctacctctggctccccactgtgccacatccctgtaccatggcatctgtgtcttttggacagcaccgggctttcaggatgactagtcagggttgtcttgtctggaccagatgctttgagggtgcagccttctgggaattccctctagggattttctatgatgctggcttccctgtaagtcccactccaggcccgggtactctgtccaagccccacagcagaagaggctcttcaggggcctcatttggtgtcaactcagcaagaagtgaagtttaaagcccagagcactgcagggcattgtactggtgtaggaggggtacatccagggctccaaggtgttttctgtgctgagctcatctctcatcccccagccaccacagtgctgggtcagagctgggctgttgttttcccatggcaggcccagccctgtctagctctcagttcctctgctctgcagccagggcccttggcctgaaccctacacatagcagcactcactcgggctgtaggtattcttcagtacctgctatggcctggcatttagggaactctcaagcaacagcacaagtgaggcccctgctctcccgtgctttgggtccgttgtaacagcacaaaaagcttgtggagtatcttaggtgagtccactcttgcagctgggcaggcatcatagtgttcagctccctgttacagtgtcgtttcttggggacatagcagatggaaaattctggggtagttttgatttagcagttatcacatttgctgttcatggagtgtctgcaggggctaggcacccctcacgatgcttgtgtctgccagccatggtggctcatccctgtaatcccagcactttgggaggctgaggtggtagatcactcagggtcagaagttggaaaccagcctggtcaatatggcaaaaccccatgtctaccaaaaatacaaaaattagccatgggtggtggtgtgcacctgtagtcccagctactcagaaggctgaggcaggagaatctcttgaacctgggaggtggaggttgcagtgacccaagattgcaccattgaactccagcgtgggcaacaggaagatcctcaacaaagatgttcatgccatttttcatcctctatctcatatagccagtaaatagccagtaaggcatggagtgggcttccaccctgggaccccagccctaagacctgcacctttttctactccagagtccttgccctccacacgctctgtaaagagcatagctgctgaaaccagcttgaggcagtcccaaggcccggcatcttgatgtcgcagatgctgcttggggccaggagagtcaccctacaaagtgtgttccagcatttactttgagacctgttggtgattagcaggtgatttctacttgcagacaaggcccatcatggcttctgtgccctgtgtggccaggccttgcctccttggccgcatgactgtggtgaaacagccaaagatggttcagactagaacagagatcagaaaatgatggcccacaggccaaatcttaccctccacctgttttttataagtaaagttttattggaacatgcccagtcattcacacttcatgtatagcttcttattataagggcaaagttgagttgtaactgagatggaatgcctccctggagcctagtatgtttagtctcaccctttataggaagtttgccaacctatgggctagaatactgaggctgatgtacactcacatgtaaagggaataccttccataccacatgtagtgatatggaaaaaatctccatgacattattactaagaggataaagcatggaagagtaccacacaatacctttctaattttagaaatagcaaatatgggccagacacagaggcttatacctgtaatcccagtactgtgggaggccaaggtggttgggtcacctgaggtcgagtgtgagaccagcctagccaacaagaggaaaacccatctctactaaaaatccaaaaattagccaggcatggtggtgcacgcctgtactcccacctacttgggaggctgaggcaggagaatcacttaaacccgggaggtggaggttggagtgagctgacattgtgtcattacattccagtctgggagacacagtctcaatctacaaaaaaaaaaaaaaaaccaaacaccaaatatgaggatatatacttccaccggtgcatacatacgtgcttctatgtgtaatgtatacctgtagaaagacacattaaaaagtaaccgtcacttagtggaggaccaaggtggggagactcactttttcatgtattcacccccctcatgctcttattctacactcctgtgttgcctatttaaaaaaggtgataaaatagttgaaaaagtgtagaggctgaatagctgagataaggaagagggagccaagaatatgtgttaatttacctttttacagatgatttttgagcagtattttcatgatagactttctgggaggaaacctgtgacgggaggggaagctcagaattgctggttttatttaagtggaaataaatttttagttgaatcataaaggtagaatgggcttagggcacaacaaaaagctgtttctcaatctaaatatttcttctctggccgagtgatgggcttctaaacaaggtgtcatccagatgaaggaagtggggtgttttcatctccatgtgatcctctctttgcttggatgaaatctggtgtgaaataatggaacagtggtccacagctgccaggagaatctcagaaaaccctcagtaccatcgtgcagacttccccacagagagcctttaggaacacactgcactcagatttgccatcttctgaggacagtctaaaaatcactgctccggaggttcagacaccgtcaaatgtttaaccagtttgtcagcccaccaaaaagccacttgtaacctcagagatatgtggaatcattcttttgggggctagtctttccatttgcagaacttccccaacagtaggattgctttcaagttggggtctcagccacagcttgcacattcgatcacccagcatgcttttaaaaatacagaggccaggccctgcctggttaatgcaacattaatctttgggcctcagcatcaggatctttttaaagttccccaggtaattctaaggtgcatccaaagttgagaagccctgctttcaaaaggctggaacaaattctggtgttacaattagatctgagtctgaggcatcaacccagcaagtattttctgagctttggtttccgttcctgtgcagtaggataaaagtaccaccctcctttcaggtggtgagccaacttgtgaatggggacagctgacaagaaatacttcctggctgccttgtacacataccaggggcccgcttcagaagcacatgggcgtcaaacttctgtatccccgcctcagttttgtcacttagctgctgctggggacacaggagcaggcaggtgatatttctagcctgtctgctcatctgtaaggtagggatctctatacccaaccacacagagccactgtgaggatccagtgagattccccagccaggctgtgcccaacacagtgccatgtcaaagtagctcctgctggtccctgtctctaaaaaacgtggcaagtccaggctcagatgggaaggatttttggggcactgaatctctgtctcaatcactcaactgtgctatcctcagtgagtgtaaccatggctgatacggaaatgcctgagaggccacattccagtacagcttaatctactaatcctgcagaaagggaaacaacggcagataaggcaggggagggccgtggagtcagacatccagcaccatgccccagctttgcctcctaggggctcgtaagccctggccagttaacttctgtgcctcagtttcctcttctagaagaggtgataatggaactcctctcctggcttctgtgagggtttaataagccaatacacgtgtaagacagcaagcatggtacctggcgcagagcagtggtgaggacgtggtcagttcttttggctcgagagctggagtgaaatacctcgggtccatctcatcacccaacgattgggcctcaggaatcttgctcaaaaatagcctgccaaatgggccttcatttctcagtgatgtccccagcactggcacacaggccagccaagttgctgccctcatggagtttatattctcatggggatgactaaaaaagcaaaaaccaaacaccaaacaaatggaaggattgcaatgggagacccaggccatgcagggcgtttacaagggtcgggggaagatttagattgggggactgatagaagagacatggtatctccagtgaaatcacttctgatttaaggtatgaattcatctcagctctgggctttcagtcatcctggaggagagaacagccaacagtgtgacacctgacctgccagagaggagagggtgtggcagatggcagggcctggggagacatggacatggaggcaggagataggcaagggcagcagagctgattgctcctggccttatatgccacgtcatcaggaacatggattgtattgagtgcagcaggcactgtctgaggggctgaaatcaggagagtgggattagatcagctttaagaggctggggacactaattggagatggtaactgcaaagcaacactcacctgcatatagttcaggcttggcctggggctttcaggctgggagggccttgggcttctggctcacagctctggggtccttcctgggatttttggatctttaagtcagtatacagctgcagttatttccaggagccatgctcacagatggggacttgagaatacagagagagattgtacaagaccactgccgcctaggggcacagagtaagaggaaaatgagtgggcacctggccctgggaaacgccctgacaaggcaggcagagaaaccagctcgtcttctcagagcttgccagacatgctctcaaggtgaacatataagtagttctggtggttgaaaaccaggtctgacacactccaacctgctgagcatggtgtagaccagctcagaccagccccagctgcttagaccaggcagggcaggtgcacacttgccatcacagtgctggaggagggaccccacagagcactgcagggagctaagcaggagctgtgggctctgaggatgctttgttccccaccccccacccctgcaagatggagtttcgtgcttgttgcccaggctggagtgcaatgacgtgatcttggctcactgcaacctccgcctcctgggttcaaacaattctgcctcagcctaccacgcagctgggattatatgcacatgccaccacccccagcctagtttttttccttaagtacagacagggtttcaccatgttggtcaggctagtctcgaactcctgaccttgtgatccacccacctaggtctaccgaaagtgctgggatttcagatggagtctcactcttttgcctaggctggagtgcagtggcatgatctccgcctcctgggttcaagcaattctcctgcctcagccacccaagtagctgggactacaggcatccaccacatttggctaatttttgtatttttagtagagacagcgttttaaccatgttgcccaggctggtctgtaaatcctgacctcaaatgatcctctcaccttggcctcccaaaagcacttgggattacaggtctaagccaccatgcccagcccggatgctttgctctttactgtgtttaagtaaatgagcaatgtgtgaataagttctggcttaaaccatttgaacgatgagcatatatagagcaaaacgtgaacatctccctcggctgcatcgtctctgccttttggtgcatctgtgtatacatgggtgcttgcttcatatgaggtttcagttttaactaaaatgggaccagatgtcttttgttctgtagcttttcccttacctgtgtcttgaaggtgtttctgtgcccctgtgcatgggtgtgcatcgtcttctgtaatgtcagcgtgtcctgctgtttccgcacacctgccatgccaggtccatgggtcctgcacataggcatggagtggtttccaagcttcctccgcagcaggatgctgcattgaacattctcgcccacgtttttgtgaacttgttcaacaatttcttaaagctgacaccaagacttggagctcccaagccagaggagctcactcacacatacctgcctcagtttccccaggtttcaccagtttgtgcatttgctaaccacagggatgccaattctcagcatccctgcccatgcctggtgacagctgtctttcagtctttcagtttgtattttccttaagtgtattagaacgtgctctctccccccccatggaatgcaattgtttattctagaaatttgtattgagcacctgctctgtgcccttctttccgtaggtgccagggtgctcaggaaagaggacaaagatacgtcagcatgccatacaggacaggcagtgcaggggagaggggctgaggagggcagcaagcacggcctctggagaaaacaatggaggtggtgaggggggtcagtcagccggagcacctttctttcttgcagaggcaggcaggagtgtgcctgcctggtgccaccgagcagcctcaagaggctggttggagttgtggggaggtggaggaaaagtgaaagggccaatcagggacaatctcagagtatcaaaaggcttattctcagacttggtccaggagtgacagggtctggcatcagtggggttactcaggtgtggcatgcagactggactatgggcagctgctgggtacagggagaaatggaggtgagagatgagggtgctcaaacccagggtatgacctcctagagagcaggagtgctgtccagtcaatccctctcatagccccagtgtttcttggcacctgagaaacatgttggttaacttttctcccatgaggcgctccctgtctttccctgcgtgtctgctgggctgctggcccctcaggttgctttgtaggagacactcatgtacgcagggtgtttccctagctgacatgtctgaggacgtctttcgttgtggggagtcacacagggattgactggacagcgcccctgctctctgggaggtcataccgtgggtttgagcaccctcatctctcacctccatttctccctgtacccagcagctgcccatagtccagtgtgcatgccacacctgagtaaccccactgatgccagaccctgtcactcctgcacgaagtctgagaataagccttccgatactctacaagattctccctgattggccctttcacttttccttccacctccccacaactccaactagccttcaggctgctcggtggcaccaggcaggcacactcctgcctgcctctgcaagaaaggtgctccagctgactgaccaacccccctcaccacctccatcattttctccagaggccgtgctttctgccctcctgttcttggtctcaaaccttatttttgcgtatggtgtcaggtctgtttacatcacaccaacttgtaacaccatctgcgtggctttcaattttcaagtgtttttttttgttcacttgtcctgtggactcatgccatgtcaccgtagtgctgagtgacgcttaaagggtgcttttcttattaatcttatagaattaatttctgctttcattgagaagtatgggttattactcttatgttctcaaagtgatggttggagtggttaaatcgctttgtcgccatgacacatcccagatgttgctgagtctgaaatgtaacctagggtcttccaattgtgaggttggtttcatggcgtcacaccccacctccctaaagctggcaagaaatccgaggtcctgtggggccagcgggcattggtctgctatagacgagctagaccaggacagaccacttgcacttcactcacctggttgagtataccagtcgtaattgtaggcactggcgatatagtacagaagatgacacttcagatggctacagatgctgtgaagaaactccaaggaactcttaggcgaaggccaaaagcacgaggaggagttagggcatggcaggcagtccccgtgttgccagaggaagtgacgatgggattacagctgtgggaaacatttgcatttgattctgaacacagtgggaagctatggaagggtttggggtctgaggaagggtcaaggcaagaagggacggtgtctgggtttaggagacacagcagagacagaagtggaagcagtagtcatgtgtctggaggcagaagccaaacgccagtgggtcttggattttgtttggaatgtgaataaagaaaaattaaggcgcccccagagttctggtttgagcattggagtcaacagttgccccctttactaaagtacagaagcccagaggaggaacagaagtttgatggtggaaaaaattgaattttttttttttgagatagggtctccgtctgtctcctcaccttgagtgtagtggcatgatctcggctcactacagcctctgccgctcaggctcaagcagtcttcccacttctgcctcatgagtagctggacaacaggtacacaccacatctggctaatttacaccccccccccccgccccaagatgaggtcttgctatgtggcccaggctggcctcagagtctgccaggctcaagccatctagctgcctcaacctccgaaagtgctgagattagacacaggagtcactgcacctggtcacaatttccattttggctatgttcaaggtagatatactcactccagggctctagagggaaaggctgacatacgaatttgggaagctttaccatttggatctatggaaagataagtggggagtgcaggcagaagagacctgggaccctgtacaatttagtggcaaagtcaccttcagagagatgggaagaatctcagaagagggtggagatgctgaatggttgagggcttgcgaatagaaacaagccacctttggcttttgagactgagtttggcatgatgttggctcactgcaacctcctcctcctgggttcaagcaattctcctgcttcagcctcctaagtagctgggattacaggaacacaccacctctcccaactaatttttgcattttcagtagagacagcatttcactatgttggctaggctgatcttgaactcctgacctcaaatgacccattctccttggcatcccagaatgctgggattgcaggtgtgagccactacacccagcccaaaaaatctttttgatgagtggcagtgcagtaggctcgtttgacaccagcatcacctcagatgcaggagtagtgcagtgcattgtgatgtcactaagcaacagatatttttcagctccatcacgatcttacaggatcactatcatatctgcagtctgttgttcaccaaaacatcatcaatgtgacatgaccatagccattccagcgagtggaggagggcctgtgcagggaactggaggattctcaagtcgtcagggcaggcaggctactattttcattcaccgcttgccctgtcttcctgtgggtcttcttcttaagattttagccacggttggttgggctgggtgctgcagtggggagagcactgtgaggtaattggccgggattacaacagagacatgattgtgctctgaacatcccatgcaaagtggggacggggcaactgagaattagaagaccagcagcattcagggataatcctttccatccttagcaagttaggcgtaatgcatctcagtttttaataattacggtttactccagcagaaccatcacagagcctctcttcagccccccctagtagatggtatctgaggtcttctgaaatgtcaggctgagccagctctgaaacgcgagatggcccctggtcacctcaagtggctatcaacaaagagacaaagaggccccctcagcatcacagccattggtaaccatcggaattttacatagagtgatatgttagccttgaagtggtgaaagctgacatctagaaagcattggtagacttctgtatgaacttaatgccatcctttaaagttaggcacagtgcatctttagtttttaatgagcactgtttaccccagggatgcacacaccccacagtgccatgcctctcagtaccccgtccatggtggatccatacacttgtcacactctgccacagctgttcacacagtgcaggccctgagcttaaaagaaacctattctccatcccacccaatcctgctgctccttgtggctgggatttgaatccatccccatcccgtttctacggggggctgcacaagcctcaccactaggctgtcccaggcccattgggtgatcatcccgcattgtacaacctgaagcagtttatctgcctgataagggctccctaggggcagggccacagtcaccaagagccacaagagggccacaggcagcccatttgcagaaaatgtgcctgagtttgattcagggcctgaaagcattgtcttgtttaatctcataggtgggttgatatcagccccatgtttcaggtaacagagggattcagagactttaaagaaatttacacagttatgggggagagagacaaaagactccttttaagtaaattcacacatcgtaactgcaatgtagaggtctaccgctgtgtccccgtgctccttagtctacgatgagtagtagtcaaattgggcttggatccctcttctggtccccaacccctggcccagtaccagtccatagcctgttaggtactgggctacacagtgggtgagcagcccttcgtctgtatttagagccactccccatcactcgcatcaccgcctgagctctgcctgtcagatcagcagcagcactgcattctgaaaggcatgcaaaccctattgtgaactgcccatgtgagggatgtaggctgcatgctacttacgagaatctcatgcctgatgatctctcaccctctcccatcgccccctgaagggaccatctagttgcaggaaaagaagctcagggctcccaatgattctacattatggtgagttgtgtaattttttccatgtagtaataatagaatgtacaaatgtaacacactttgtatctcaaaagcatccccaccccctacatctgtgggaaatttttcttatacataactcgtccctggtgccaaaaaggttggggactgctgccacgtgaccttgcacatggccctgtatccaaatgtaagccacattctgcttctctaccatgggcctggggcagtaacttctcgagcttcccatctgccatggtgagaacaccaagaaatagatgaaatagtgatgcccagcctcacagcagtcactctgaaagcattacacagcaccttcgtctttactatcttccaggccatttccatcatcatctctggcattctaatgccagactgctttgatttaaaataccagatttcagaggctgaggcaggagaatggcatgaatgcaggaggtggagcttgcagtgagtcgagattacatcactgcactccagcctgggcaacagagcaagactccaccacgaaaaaaagattttgcaagcaacttcacttacattttggaagacttaatatgacaaatacacaaagaaaaatgactagaaaactatgtaactactgtcctaacagtggttatccacaaaggatgggttgacaagctattctagttctgtgttcccctccccccccaacaaacagtaagcctttctcacttttttttaattcaccatttaacttgtgcttgtagaagagcaactacacagctagagcttgcagaagaaaagcctgaagcttaaaaatatcaggaacacagcagcaatgtcacagtgttattgaaagcacactcaaaatgtcatgaaaaaataatgctgggtttaccgaagggggatttacattcatctggtgacaggttgtgcgctcagtattttgagttctttaatccccaaaagccacagtgtctgtcctgtaggcatccatgtccccagccccgagtcttttgggttcttgcctgggagtcacacttacctcctgcttttctgggcacgcctgtcctgccctccaccttccaagaccatttctatttctggttgaaacgttgctcagtgtgattccttggggtctgtccatctgtacctctcataaagcagcaagcaacagctgccttgtcacatccccaccttgtgccaccacctaactagcatcttgggggctgggcttggatgcatttatatctagtcatcgactctgggctcagagtgcacacattcaacatcaaaaccagcctctgctcctgattagccataggatttaccctctgtgctttattttccatgcccttaagattaggatggtaattacagcacccatttcacatggccggcttaaggatgttatgagaattggtgttagtcctttagttcaagatttgacaagcagtggcttttttaatccttttaaaataaagtacctcgtggtgttgggatccggagaaccagacccagacctgccttcaaggaacccttgggtactgccagagccatttctggatcagttgtggatggtggaagtcttggagacccatttcaaaccaagaggtaggaggtaaaggccttgatggatgtcagcatagttcacagtggaattagatttcacggggcacccatcacgcagtcctgaggcccaggtgttgcctaggaatgaattcaaaggctattcagcctggcatgctctgatactgcccatcaggacccccgcagccatgcagtacagaaggcagagcaaggccactccctcccactccacagatccaaggggctaagacacagggagaacattctccatgatcttcacatcctggaggcacaactgggttttcaaagtggtgagactcacagacttatgagggagctaggtcgtggaggatgctggccagatccccgccacacacacagatcagtcctagctgggttgcagggatccagccctctaagcttcaaaggcagctcctagtaagtggagtattgaccggctcgccagacccagatcacaggtgaaacaaagtgaaaagttagtctctcctcgcagccattttcactgatgagcagttgaggctgtccgattaatgtcagccgcatgctggtgacaggacacaacgcagtgtaccccaagaggcttattaaaaagaacagccactcctggggccctctgagggtgccctcacacacagacccccttttccccaactccccagtgctgtgttaagttgctagcagcagggaggatggagatggagtttctgaaatgaacaccaaagcacatgtcaggaccacgcgtggcctggcagggggctcattaccgcagcttacatccttctccctgcaggggaggggaggcagtgccctggggacttatgggctgtctcctaggtgaccgtggcatcccaggagttccttctccagttgccttccaggtgagcttagagccaggtgcatccctgggggcatgacatccccagagtgtttcccagcttggtgacaatggactctgcaacccaggaggcctggcccctcatggatttggggatggaatcatctgtgccattttccttcccgtgttttctgcccagtagtttgaaccgcatttctaaggccgttccctctcctgtgtgaccccaaaatggctctggcaataccaggtctgtggagtaagattgaggtctgacctgagcatagggttcacagaggagtgaaccctgctggaggtggccaagttcagaagtgaagggcgagggcattcactaagcagcatccccatgggccacgctctatcccagcatcaaacgttatcgttggctttgtcccaagaacctgcagggcagattctgtgatttccccctttatttttgcttgcaccattttttaaaacagcaagagacagatcacataccatacaatttacccacttaaagtgcacacagcttgctagtttgactttgatcccccttcataggctaggaactcgagtcctagaaaggagcatcgtgagcagcccaagtacacctgctggtgaatgacacagccaggagtcatctaagacactgtccccgtggtccctagtttttacccagagacggggacaaaggtcgctggctcttgagagctacaggctatcagggtcttccctgaggggctgttttatgtcgggaaagtctagacttacaggcactgccctctttggagtcgagattgaagcctaccgtggtactgtttctcccttttatggcgtagttccttgagttttcacaaaggcttggagtcctttagccatcaccatcaagatgtggaacaactcctttacccccaaatttcctagcattcccctataggcaacccgacagctcccgctctgtgctttgtcattcctagttttgggaatttgatgatgtgcttgagattcgtccatgttgccaaaaacctgcatagtacgaagcaaacattcacccaacacaaggggtagcaaaggaacgagggctgattcgtaagaagaactgcttcaatgcacctttaaaaccgtgttaatatcattgcaagggccaaggtcgcctcaaaatgtaggtactagaagagaaatccagaatgttacatagaagacgcacgctaacaagagagcccgggaaaggtcgccacacgtcctcatcccagctcccgggggggcaactctgggctcagggacgtcacttcccacagttaacatgctgggattctgaggctcataccctgaaagtggcctccccatcatcactgaccccgcccaggtagcagaggaacgtcaggttctgcatccacagctcggaaagtctgctttgtgactggagagtgtcaccgtcgaggagtggccattatcctgagcctgtcttttatcgccacgttgatattttacccgtgacaatgaaaatagatggcgactggattttgttccttgccgtatgtcctttgcaggtaaatttaggaaacctaatagggtaaaaggctcaaggaatagggccattaaaacggggagactcatccccgcatgtgaaaaattgagttgtctcccaccactacctgaggggtctaccccaccccgttgggtggtggcttaggcctccatgtctgtatcaccacatctcacagactgtcctggccccagaaggtaggaactgagtcttttcaatttcccgagagcccatgatggggtctggcctcatctaagaggaacatgaggaaagccagagatggcagtgtcattctttacccaacacccacaacttctccaccctcgtctgcagacctgtctgaagactgcaacacccacccatttgctgccttttatttattcaggctgtctgtaaatatccctgctgaatagccgtctctccccatctctagccccttcggcctctgccgtctctggagcaggcagctgaagacctacaatacctagacgctgatcttgttccagaaagaagaggaagggcttttcagataaggttccctctgccccctgcagcaccctcttcccccagggtagggagttgaggagttgcaccggtaataggttgtggtttgcaacgatgctgtattttgggagtttgtaatatctttgtaaaatcctccttgattgggtgtggtggattatgcctataatcccagcacttgggaggcctgaggtagaggattgcttgagttcaggagtttgagaccatcctgggcaccatagggagacccccatctctaagagaaaaaaatctctactcagttcctttggtatattagatgcctctaccagtaaaagttcctatgaagttgctggctagacttcactagtgtctcttaccttatttcagtcatttcaggatgtcaaaggagccaaatctgtttctaatcaccaccaactgcataaatatgtatcaaatgatgtatggttggcactattatcctcatttcacagatcagaaagctgtgttttggggaggttatgcatctttctccaaggtctagagtgtcttaacagaaggaactcaagttttctgactctgaatatggagttaagggctttggcaacccattcttatggattgccatccagacgcccctttttcttgtttgtaaaactgtaacagacctagtcccagcattaacagagtccctgctggggagcaggaatggaacatatcttgtccacacattcctctgttgcttaggccccagagctgcaagcccactttgttacaaaaatgcagttgtgcccaacaactgtctgcttcttggtgactggctttatgattgcagccagctaagaaatggtgttgtcattccagaagtctcggtggtacagaaggctgaagtcggcagctaacaagggctatgagagatgagaatttcactctgaggatcctggggggaggaggcatctgcagcagggactggagggaaccttggtgttaaaaaaaaaaggctgtcattgtaaatgtgaggcgtttcagcttccgactacagcccgtgtctctactgttggacgccagtcctgggatgagcctggcactggcttcattcccctgtagcaaaggggcccagtggggacacatggggtcatcttctcttctgagtactggccctagtctcttatccacattaaccccacttcctttgccagtttacatactcccagtcctacccaaccccccaccttcagattctgctattcagccagacagcattaccagtattaggctgttctcaatctataaagatggcagttacaagaggttcagcctcacatacgccagcagccaccagcactctccattcaagtccactgtgctcagcagtctgggttttccatctgtcacgcactcactgaagcccctggtctagccagatttccgcaggtgtcatccactcaacttgtcccaaatgaagcccatcctcccgtggcctcacctgccccctcctcatcctgggttctctcaaaccatcacagcacccctgcctccaagcctgtgtcccgagacatggctctgctccacatggcctcgaggattgaaccatccctgtgtcacagaagcctactgtcacaccatcaaccacagcagcctacactcactgggacttcccaggtgccaggcacagacatgtgacacatatagcctcgtgacagctcagtgcacgtcccgagctaaccctgccttccaggaaggggaagcagctgggccgggtctgcccagctacaagtccaccccctccccatgggcctgccaccttcaccttttttcattttcacatctagagggccctttacacagcaaccctcagctcacttctggtcaccctccacacctctgcctcctccgggaagccctctgtgccctgctcagaacaacctgagttccctctcattggggcatccaccgtgatccaccacagccatctgtccagtgtctgccctccccatcctcaatgacactgtggctttccaaacctgaggccacttctgcaccccttcatgcccagcccagcatggtggtgacacaggtcatgtgtttgaatgttcactgttgcccattgtctctctaggcacttgatccccatgatgcttaaaaccaccccacctttattctgtccaaggctcagagggcaggcatttgcctacagaaacacagctagttggtggctttaggtagcccttgaatccttaccaccacagtactaggatatgcttatggttgtcatccccaaatgacagacaaggaaaccaagggtcagacagcactgcccacagcaggactggacagagacacgtgcctccaagctatgtcctctccctaccccttcataacagtcaccccaccgactgctacctctcctctcccaaccaacaaggcactggcctctcccaggcactctcagagcctgttacctccagggcctctccccaagctctggtcattgcagggcagggctcatcctggctgtgctgaatgatggtggtggttgcaggctaagtggctgctcagaccccgcatctgaagagcatgacaggagggggttgtgagggcatggctttaaactgacttttacatccaagccttcctgtatctaagaatcagttcccctacactgcaagcaaagacctccttccagcatctttgaaccatcctctaaggagcattcagggataaagaggctcttcgtaagtggggtcccatcctttgaagagaggatcatgtttgctttgggcctgcagccagacacccacctaaaggaggaaagcacagcgcacgccaggctggttgggctcagagatgattcagagcagctccggctttgttcaaggtcaaatgtttctttttcatccatgcacagaaggcaaagcaacaacttgacttacaggaaaagacaatcattaaaaggggtcttcattttgttagcttatcagggtgtcaaacttgaaacgagggatctcactcgcacagtggccatgtccctggaaaggtgcaacgcaaagtagatcattgtgaagagattcactcctgagatacatgaagatgctaggctgtttcagggaaccctgcagggatcctcgaggggaatgatttctttatgaatgcaagtctcttaactcacatgatttgtgaaactgggcttggatacagctgggggtggatgttcctgatctgacattctcacttggcatctttggtcctttctaaaccacagataaggcagagctagctgtggacacagtcctgtcttcccttgtagggtccagtggatccaggacttacatccagcaagccacagcagcacagaggtgctgcggacgcaggagtggacatggatcctgttaggtttttgccttgttttaaaacattttatcccagtgaggtatttacttcctattcaaatagcgtatagtaggcagagtaagaacattcctagccccagaatttatgtgtccccttatctagcaaaagggactttacagatgtgattaaggattggccaggcacagtggctcacacctgtaatcccagcactttaggaggctgagcaagaggatcacttgagaccagcctggacaagagcaagaccccatctctacaaaaaattacactcaggtatggtggctagtacctatagtcccagctgctcaggaggctgaggtgagaggatcacttgagcccaggagatcgaggctgcagcaagttatcattacacgattgcactgtaaaacctgggcaagagtcgagactgtctccagaaaatacaattttgaaaaaatgcaaccacatcacaggacttcctgctgagcaccctctgctctcacggtgaagcctcccagcctctaccctatcccctaaaaaatgtgccgagggcctcccacacaacccagacccatgccctgggacccacacacactgtgtgttcgcgttgcttcagaaccaggatcagtgtccccctcttggtgttatcttccactgttcttggctcttaaacacaataccatgccaaacaaccttttaactagcccctagcctaggtcctgattattttcttaggattaattccacaggaagtccgtctcctgtgttttgctacacatcttgtgtggctttatgtagtgttctccaaagttgccttggacttagaagcgtacctttgctggaaaatcaaggaaaatgtggggaagaaagctgtgcctagaacattctttcatagccttaaaatgtagaccggaacggtggtaccatgagctagctcagactcacagccaagcttggttggagcctcggagtgctgtaaaaaaaaaaaaaaaaaaaaaaaatggaaaggtttacgtgacaataggggtttctcatttcttcaggtggcaccagttagaggcagatccaatgagccagtcacagttgccaatcagatccctcctgccctcacacctggctccccttcctggcctgtggtcatttgcttttcatccgcagacttaacccgattctctccctgctctttcagcgacatcaccccgcccggagagcctgtgaacagccggcccaaagcagcttcccgctttcccaaactgtcccggggtcagccccgggagacccgcaacgtggagccccagagcggtgacctctgacctcgacaaaaccgcagccacgggccctgtgcgtggcaccagctgcgtccaccccagccactgccgctggcccctcacctcagcgtgacaaccacgtcccactggtgatcctgagagcacacgattcccaacagttacacaacaccccgattaaactaatcagtcttcgagccgcatgataccgtgacccgagagaccaaggcagcacctcgctggagagactgggacacacagtccttctgcttctggggtctaccctgggctgcaagggctgttcctccaccttcctatagttcagggctggcaggagggtgggcaccaggtcaggctgggtgcgccatggttgagaggcaaaggtgatcccctatataggaaggttcatgcagagccagcctctccactctttcccatgtggggactagaatgactattagcctctccctttgctttttaaggttattacctggcctaacctagggatggctggctttgcgggggggggggggggggggggcatggttcctttcactgcattttccaccaacagtcattagacacctggcactgtcacagctcacttttccagagggatattcctgtggctttggcaaggagccattagtgatgtgcaacttgagttcagagaacttcccctacctcccccatggctggcttcaggaaggaccagtgccctccatagcctgaggccacctaggccctcgccaggcttggagtggggggactcagacatctggcccagccatcagcagcaacctagtaacccggcgtcctccagcgtgtccaaagtagcattggccctacagtcatgagagacttgggtcagggaaccactgcagaaggttccagggttttcaaaccaggctccatgactatgaagttggacccagtgtggacacttaacagatcatgtgtctctccactaaaaacattttccatcccgtctgcccccgacattgtccttgataacagaactctgcatcccctaagacagagtcctctgttcctcccatgtcaggtggctctcagagtacagggaccttggcaggtggagaggaggatggggaccagcagctgggcagcccccagggctcctcctccagtgagctcacatcagagcacctcacagagcaatagccgtcctcagatgctcagcaaagttgtggcagtttgcatttctagggtaaactaactaggaaggatgtcgtgaaatggactatgcaagagtaagtttgtgtgtttcgccttaatctgaggcagagacacagcagaacctgaggacaaaagcaggtggaaggtgacggttagatggtaagccatgggcttgtcctggaactgcttcaactcagtggcttaaaatgagaactgcccaggtgagcatggagcatctcctaggctcgaggacatctctggagaatcatctggaaggtttatactgtgccttcccctcgtagcaaaaaggaagattgttcgtggcctttaaggaaggctgagatcactcacacacagcgcccccccaccccagagaaaccgagtcagcctacatgacttccaaggggacctggggccagataagccctgccccggtgagaccaaatgagctggagcatgtatggaggtgcggaccctgcagtcagtttgcgagtgtggaggacccgagacatcctgtaaaggcaacttggtctccctcccactcacctgccaacattgctgcaatacacatggtttatctgaaattccagggccaaagtgcacatcagctcacctgactggcaactctaaatagagagccctaatggactgaggcaggaaacgtctaaaagctcaatctgctgtatgtcatgaccccttaggttgggtttatgccacatcggtcattttgaagtaggtgtttgatgccagctcagagactgtctcaggagtgcctccctggcctgggtagctaccctggaggtcatctccctgttctctgttggataaaggaacctcccccatctgtgacattcccttgggcccaggcttatgacctgcaccttttctgacacctgcccccaaagcacaggatgtgaattggtctctctccagataccccacgaggaagcaccttggacattctgcacatgataataatgcaacggagtcccccattgctgagagatactaacctgtgagaaacaagtatgctctcagctggtgttgaactggtgggagaaactgcctcctacttttataatactgaattattcacaaaaaacctggtctgctctccaaaatggggagagcatgttcctgggagccacatggggaccatccccagctgcctgctcctggtacctcccccatgatcatgcacagaccgtagagtcgagtcatctcgcagatccagaccatctcctctcattctcactctaaaaatgctggtggcccgcacatgacagcaactccccgaagccttccctttggaatcccatagaatgttctgcaatgattgggtccatcttgctgctcagaagaatcccgtcctgctctctagtgtggtgggatgaacttcaggcaacaaacaactggcagggttcccagttcctggagttatggagcagaaacacccaggcctagcagaattgtggctgaaacctggtgcccaaattccacaccctggaaatgtgtcaactgcccgtcagcctggattcaattctgagggctaagccacgaccttatccatgagtggcgaagacacccctgaggaaaggattgcttgcacctcacatctgtcttcttctaagattactcggagattttcaaacaacatctgagaacagaagccccctcccctactcagagaggaacgagggtggcccacctctcaagggccttggattcctgggaccaccctttgctgggaggaagaatccacaccgaatccttctgtcttcatggcctgctgtgctgaaacagaacagcaggttccatctttcacatctttttttctcccccagatgaaagacgactcaggaacggtagggctgggcagaggtgtctctccttgagagacaacaaaagcttctaagggagggagcttaaaggctgctagaaacctagcccaaccatccactcctgatctgagacagaaccttctccgccactcttcctgcaatcagtgtgaaattccagcttctttgattcccacttagcagtatgctccaatcacgttgctggcaaggcattttagagtttggagctgaggttcaaagccccctgcatttctctactggcaggccctggtgaaggaagacactttcagggaagaggctcttacagtctatggtggtagccatcttcacatccagtcaccagttgcatctagggagctgctggctataaaagggatcatccagtggagttgtaaacgagggaaccatcttgcaagatctaggaagaggaaggggagggatgtggactgggtctgatcacagcccttggccctgcttcatactttggagcttattaagatcaattttgataaccatgtaatttcttagaaccatggcaggtagtattgtgctttaaaaaccagaggctcctgaaagtcgtttacaccaggtggattgataccatggctgtagctgatgcaactaacaagtactggggccagtgatcacaatccagggttggaaacaggagtgaagcccaccagcctgcctggttgatggacagcaggctctgccttctggaggcggcttatatcccaacagcctgaggcagggctctgtggcccaggccagcagtggctgcctctcttggttctgcatggtacattttgccaaccctgaggaccagttcttggggttccaggcctcggccttcctgctccacgtgctcaagtccccacatggggctgcgacaccatctggctcctcacagggaggtccagccatgttctgtgggctcccagtgagccccctcccctccggctacccccagaatccatccttcattcctccaccaagctcctgtgtgagctgcagcgcccacacgggggaagccctgcactccagcagcatcttccagccttggcacagaactgatggcaaaggaagggctgggttttcagcttctgggacccgaggaagaccccacctcactcctccttccccagtacatcagactggttaggaggcatcccagaaggggcagcctcatgcccaggtttcagccctaaaggtaatgattgtcttgactctgccttggcatttcgctcggaatcacggcagacttggagtgtttcttcaaggcaggcatctgcttatgagcaaggtcaaagatttttcaaaatattgtgcattaattcattaaagctactgttaaatatttgctgtttttagattggcgtccgtgctaattctgcagttgtagcactgtatattttatctcatttctgtgccaagaaagttcatctttatgtttttctaatacacaatcttgatcatgtttccaaaataaagcttcagctccttggtcaatagaagtaagggtgtagccatccagggtctcccggctctaggcagaccggatcccgcggttcatcccatggttgttgaaatgtacctcgatcagtcatctctggtattcctcactctggccatgagccattgccatcttatgggcccgatttgggtactctgaattatgtcatggagtagacagttacttctaaatcccagcaaccaagttgcgtatccttccttatagctagtttctatagagaagtgaaaaagaaatctggcttccttaataagatagttgagcctatgacattaaggagcagcgctgctggcggaagattctagattcactggtggtttaagaggcccagggatttagttcttactggtgcgtaagtgttttcccatcctaaccggaaaaccactcacccaggcttcccccacttcccctcaaattttctcagctctgccgctggtctccatgaacggcaaggggaaccaccactcattcactgtcagtgtaggtaagacagaggatgcccttgcaaaaattgggactgaggacagtagcacacggaatggtggatcgtacatttgcacccagagctactaaacgctcagtgaccccagagaccattaatttcccggagtgaaggggatgggggtagagctaattggaatttttattatccaggactcatcctaagaagaatgttggcctctcttcatccctggcttagccgtcaggtagaacgcttactcacctgacaccgacttcttagagaagcgagtcttttttgaatggaggagcgatggtaaccccactagggggcgcccatgatcggctcccagtgcacccccttaagggtaagcaggccgcatatctagagtctgatagtctgtgtgtacataaggtctagaagtctgtggaaacgccctgaaacttgtagtattatcttaactaccctcttatgttaaggtttacataataggatttttaaacaaatgtgtttaattttttaagatctcttgtattaaaattttcttttggaataagctgtggaaattttgttacaacctggttgagatcaacctctttacaatgacacaaattgtgacattttataaattagatacttcagtggatggtctctgtctcagttctttttcaacaactggagattgaggtgaacttaatacacgtggatcaactgaattgaaatggagcagaatctcattttgagttaattaggcagatttggataaactggcaatgcagcattaaaatttcatacagaaaacactcctcattacaggtacctatgtattcacttctagaagaaactattaggcggctactgtataccaggtgcttggcatacagcagtaagacaggtaaggtgtactgttggagtcgcactggacatgaagcagacagatttttaagaagtcaaccatccggataatttcagaccacagtaaatattgcaaaagagtgacaggaattagaaattcttggtcccaaccaagaatctacgttcaacagcctaggcactgctgtcattggggactggatgattctgttgtggggggccgtcccgtacattgtaggatgcctccacctgttagatgccaggggcacccctttagttacaacagatgtccagacatggccagaggtcccctggggggaggggggccagtggagagccatggggctaaggccaaggggtcctcttggctaaggtggcttttttttttggagacagttttttactcttgttgcccaggctggagtgcaaaggtgccatctccgctcaccacaacctccgcctcccgggttcaagcaattctcctgcctcaagcctcctgcgtagctgggattacatgcatgggccagcactcctggctaaagttttatgttttagtagagacagggtttttccatgttggtcaggcttgtctcgaactcagacctcaagtgatccacccacctcagcttccaaaagtgctgggattacatgtgtgagccaccacacctggctggctaaagtgacttttaagctgagacctaaaggatgaaaagaaactctgcactgcccccacacctcccaaataatttacactggcttaagtactcagaccctgcaacaaaataggcaacatttttaacccagttatggtaacagagaaaagaaaggctcctgggatgagaatccaggcataaagtcagttcccaccagggccgcatgaagggcattgttgcaggtggctcttaaagcccggctgcgcaaacgctgctgtgggctgtcacagatggaggcggtgcataaccatttctgtctggggttgggggtgatatgggcaccatgccaggcaccccacagctacgttgccatgggcattaagtcaggaggccgcacttaggggaatgcagagggacgtcaagacagtcttcaggctgctgctcctgtcctgcaccatcctaagtgaccctcccaatgccacctccatcagcgctgtgcagcggaaataccatgtgagccatgtatgccatttaaaattttcagccaggtgcagtggctcaggcctgtaatcccagcactttgggaggctgaaacaggaggacagcttgaggccaggtattcaagaccagcctgggcagcatagcaaaaccctgtctctaacaaggttttttttttttgttttttgttttttttttttttttgagacggagtcttgctctgtcgcccaggctggagtacagtggcaccaatctcagctcactgcaacctctgccttctgggttcacgccattctcctgcctcagcctcccaggtagctgggacctacaggcaaatgcctccatgcctggctaattttttttttttttttttttttaaagtagagatggggtttcatcatgttagccaggatggtctcgatttcctaaacctcgtgatccacccatctcggcctcgcaaagtgctgggattacagcagtgagccaccgtgcccggcccagtttttgtttttttttttttttttaaattagccacatatggtagcatgctcctgtcttcccagctactcaggaggccaggacaggtagatcgcttgagcccaggagttcaagtctgcagtgagcagtgatcatagcactacattccagcctgggcaacagagtgagatcctgtttcacaaaaacaaattctagtagccccattaaaaatatttttaaaacgcaggtgataattgtaatagtttatttcatttaacccaatacatccaagacattgccatttcaacacgcaatccttttgaatcttactgatttattttccatttttgggtactaagtctgccaaactagtgtgttattttatgcactgcacagctctgctcagacgaactgcatctcaaggactcagtgtcctgtatgactggtgtcttcccgtattgggcaacagagctctgtggacccaactcccaaacctatgtcagcctcatctctgactgcctaaccaacactccatttgcatcacttcacgagcatctcaaaccaaactaaaaggcatcttttgttttctgccccaaaagtgctcctacccgtgactccccagctcaggaagtagaggttccatctcagcagctgtggaggccaccagtccttgcctcttcctgtcccctacctcgtaattgaccaggttcctatttattcacttccttaagaaacaagcacctactgtataccagttgccgggcacacggcagtgagcaagacaggtaaggtgcactactgcccttggctccacccctgaaatagatctagatccgactgcttccagcaccctccacgcctcaccaccaccatggtcaaagctgccattgcctctcatgatgtgggtgccacactgtcctccccagtcaccccccgtgccatcacactgccattcaggctcctctccacgcagtaaccactgcgacctttaacattggtttggatcactcactcgaccacaatcctccataggactcctgccctgctctgctcctggtgacctctgccgtggcagacagtgctttaaaaagtattggctgggtgcagtggctcacacctgcaatcccaacacttttagaggccaagatgggttggatcagttgagcccaggaattttgaccagcctagtcaacatagtaacaattccatctctacaaaaaaacacaacatgtacacacacacacacacacacacacaagccaggtgtggttgcatatgcctgtgtctcagctcctcaggagacagatgggaggatcgcttgagcctaggaggcagaggctgccatgagctgtgatcacaccactgtattctagcctgagcaacaaagcaagcccgtctcaaaacaaaaccgaaccctaaaatctgctatgaaggggcagggatgtggggggctgtcatagaaacttgccctgagagtggcctcaaagcctgcgctaatgccccaccatctatagctgaggattctgaggattctttccgacgtgcatgtaagtgatgggtaattgaggcatcattgtgtgtgaagcgggacctctgagaaccttgatgactgactgacaggccgaggcagcctggattctccacacggagtgttcctcctagagtctgcatacatctgtgacatgccatctgtgacagaccctacaatagccccaaagacacccacccccaaatccccgaaacctgtgaatgtatgaccttacaaggggcagggggttgaacagtgtcccccaaaactcatgcctgcctagaacctgagtgtggccttacttggacacagagggtctttgcaaatgtcatcaagatgaggtcacactgtatttgagtgagtgccaatccagtgactggtgtccctgccaggagggggaaatctggacagagggaaaacagcttgtgaagacaggcagggactggcgtgtggcagctacaacccaaggtgcgtccaggagtgccggcaaccatgacaggccaggagaggggcacggggcacccgccctcagaggccccaggaggagccagcactgccgacacctggaattcagacccctggccttcagaagtagaaatacatttgtttgttttgagccaccatcttatggtcactcatgacagcacctccaggaagcaatacacatggtgcaagggcctttgcagatgggaataactggaggatctgcagatggggagatgccgccgatcatctaagcagcccagtggcatcagaagagtccttggaagagtcaggagaggagacgtgatggtggaaggagagagacaagggacagtatgagatttgaagatgccaccctgctagcttagaagatggtggaagggccttcacagctagggaatgcaggcagcctcgggaaaccagaaaaggcagggaactaatgctcctcctagatgtcaccctttaagtgtcaaccccggggctaacacaggcatccagtgactcctcacaagcagccaccagtggtcggctgagggaggcagtgtggccagcatcatagcagcaggtgttccacgccccctaccacccctgctccatgccagccctacactgagccctgggatccagaaacaatgag

SEQ ID NO: 77 - DNA, 1019 bp, Homo sapiens
gtcttctcgctctttctgtatctttcagtgcaggcctggcatctcttgggcacacaccgattcgtgcatgtagttgacagtgaataagctaaatgtgcatttgatgccactctagggcgtatgccagatactgggttaggcttcatgtgctccaggtgaccaaagtctgaccccctagcctggacaggtttcctgtctggccctcgctgatctctgaacctgtgccacttttgttctgctgccctgccattcctctcttacacacctgatgtctcctgcagttgtgccaaatctttggagtgttgatggagaagttacagtagctgaacagaagccgggagaaattgctgaagaactcgcaagctcctacgaaagaaagctcatcgaggtggcagagatgcatggcgagctgattgagttcaacgagcgcctgcacagggccctggtagccaaggaagccctcgtgtcccagatgaggcaggagctcatcgatctccggggaccggtgcctggagatttgagtcaaacgtccgaagaccagagtttgtcggattttgaaatatcaaaccgggcgctgatcaacgtctggatcccctcagtgtttctccggggcaaagcagcaaatgcattccacgtgtatcagctatttaaaaatgtgaaaatcattcttagtctgtgggccgtatgaaaacagccagcaggccaggcgtccagcctggtttgagaggagtgcgtctggagggaacagtgtgtcagaggaagatggagcatctgcctaaatcctgccgggcctagggcctgcgtgggctttctctgtcatgctccttcctatggaagctgctcagtagatcctgctggggacatggcattgcggcactgagacatcagagcagggtcacctgtgtgctactagaggggcccacgctgttcctccctgactactctaccaacccctggccaaggcagcagagagagtctttgcgcagatactctgataaatcaaactacaatggatgcca

SEQ ID NO: 78 - protein, 139 aa, Homo sapiens
MSPAVVPNLWSVDGEVTVAEQKPGEIAEELASSYERKLIEVAEMHGELIEFNERLHRALVAKEALVSQMRQELIDLRGPVPGDLSQTSEDQSLSDFEISNRALINVWIPSVFLRGKAANAFHVYQLFKNVKIILSLWAV

SEQ ID NO: 79 - DNA, 557 bp, Homo sapiens
cctcattctcccctatggaagaccttgtgtagcccttcatcaggcgtgtgttgtggctttgtcacactgttttgtaatgatcgctttgcatgtcttttccagctgactccgccaccatctcctgcctggatgactgcagcagcatccttgctggcctctctgcttcctgcattgcctcctctgaatcttcaggatgccaagtttgtggaggaacggagaaagcagctccagaattacctgcgcagcgtcatgaacaaagtcatccagatggtccccgagttcgctgccagccccaagaaggagaccctcatccagctgatgcccttcttcgtgatgggattacaggtcggaatgtacggattgtttcattttggggtaatgatggatcagccacagccaagccttacccgtgctgacgaatctccatgtgatcgtgtcctttctccatgtgctgcccacagaaagcagcgagactgctgtctcagctggaaagctgagcctgagagatttctggttaaaaaaaaataaaaaataaaaatctcctgcctaaggaaata

SEQ ID NO: 80 - protein, 130 aa, Homo sapiens
MTAAASLLASLLPALPPLNLQDAKFVEERRKQLQNYLRSVMNKVIQMVPEFADKKETLIQLMPFFVMGLQVGMYGLFHFGVMMDQPQPSLTRADESPCDRVLSPCAAHRKQRDCCLSWKAEPERFLVKKK

SEQ ID NO: 81 - DNA, 1487 bp, Homo sapiens
gccactggaagggaacacctgcctctcccagatgcacagctgggctccgctgaaggtgctgcacaatgactccgacatcctcttccctgtcagtggcgtgggctcctacagcccagcagatgcccccctcggaagcctggagaacgggacaggaccagaggaccacgttctcccggatcctggacttcggtacagtgtggaagccagctctccaggccacggaagtcctctgagcagcctgttaccttctgcctcagtgccagagtccatgacaattagtgaactgcgccaggccactgtggccatgatgaacaggaaggatgagctggaggaggagaacagatcactgcgaaacctgctcgacggtgagatggagcactcagccgcgctccggcaagaggtggacaccttgaaaaggaaggtggctgaacaggaggagcggcagggcatgaaggtccaggcgctggccagagagaacgaggtgctcaaagtccaactgaagaaatatgtaggagctgtccagatgctgaaaagagaaggtcaaacagctgaagtgccaaatctttggagtgttgatggagaagttacagtagctgaacagaagccgggagaaattgctgaagaactcgcaagctcctacgaaagaaagctcatcgaggtggcagagatgcatggcgagctgattgagttcaacgagcgcctgcacagggccctggtagccaaggaagccctcgtgtcccagatgaggcaggagctcatcgatctccggggaccggtgcctggagatttgagtcaaacgtccgaagaccagagtttgtcggattttgaaatatcaaaccgggcgctgatcaacgtctggatcccctcagtgtttctccggggcaaagcagcaaatgcattccacgtgtatcaggtctacatccggataaaagacgatgaatggaatatttatcgccggtatacagagttcaggagtttgcaccacaagttacaaaacaagtaccctcaagtgagggcctacaacttcccacccaaaaaggccattggaaacaaggatgccaagtttgtggaggaacggagaaagcagctccagaattacctgcgcagcgtcatgaacaaagtcatccagatggtccccgagttcgctgccagccccaagaaggagaccctcatccagctgatgcccttcttcgtcgacatcaccccgcccggagagcctgtgaacagccggcccaaagcagcttcccgctttcccaaactgtcccggggtcagccccgggagacccgcaacgtggagccccagagcggtgacctctgacctcgacaaaaccgcagccacgggccctgtgcgtggcaccagctgcgtccaccccagccactgccgctggcccctcacctcagcgtgacaaccacgtcccactggtgatcctgagagcacacgattcccaacagttacacaacaccccgattaaactaatcagtcttcg

SEQ ID NO: 82 - protein, 424 aa, Homo sapiens
MHSWAPLKVLHNDSDILFPVSGVGSYSPADAPLGSLENGTGPEDHVLPDPGLRYSVEASSPGHGSPLSSLLPSASVPESMTISELRQATVAMMNRKDELEEENRSLRNLLDGEMEHSAALRQEVDTLKRKVAEQEERQGMKVQARENEVLKVQLKKYVGAVQMLKREGQTAEVPNLWSVDGEVTVAEQKPGEIAEELASSYERKLIEVAEMHGELIEFNERLHRALVAKEALVSQMRQELIDLRGPVPGDLSQTSEDQSLSDFEISNRALINVWIPSVFLRGKAANAFHVYQVYIRIKDDEWNIYRRYTEFRSLHHKLQNKYPQVRAYNFPPKKAIGNKDAKFVEERRKQLQNYLRSVMNKVIQMVPEFADKKETLIQLMPFFVDITPPGEPVNSRPKAASRFPKLSRGQPRETRNVEPQSGDL

SEQ ID NO: 83 - DNA, 23845 bp, Mus musculus
  misc_feature (1)...(23845): n = A, C, G or T/U
gctgccaccgagtcctcccctgctgcggagcaatggtaaagcccgcagctcaaattccgagaattgagctctgttgattcttagaactggggttcttagaagtggtgatgcaagaagtttctaggaaaggccggacaccaggtgattattgctgttgctgccgccgccgctgccgctgccgccgccgccgctgttgccgctggtgccgctgccgccgccgctgctcatgatcattattttaccttttaattctttttttttccgcttttgccaaatgctttggctccaagtttcctatgtgtatctattgatataaatgtatctatttattgattctagctgtcaggtgttaaaataaatgccgaagatcagccccacgtctctcccactgtaggatctagcttttcgcatacgtattcttcttcttcttcttcttcttcttcttcttcttcttttttttttttttttttttttttttttgctgtcttggagcgcctcggccgcctcggggaggctgtgccgccctgcccggtgttgtttcggtgtttggagacgcaggggcgcggggcggcgggcgctgggttgcgcggcctgggagggcggaccgcggcggccccgccggcttcgcgcggcttggcttgctttctctgctcgcttgcaaactgccttccccgccgctgcctccctccccgctcagttctcccggtgcccgcgttggcggccgtccaccggccccggccccggccccggccccgcacagtccctgccttgcacccgagccgggagtcagcggggggaatgcaagccaactcctcggctggttgttttattttcccttttctttttggtcataaagccagatgaagtatcgtgtctgcagtttcctttgagagccgtgatcttcccaaggagagacagtgttttgggaaggcttcgcttgcacggggggcggggacgttgaatactttgaaaattactctttcttggttggagtcgaggcagtcgggaacccgggtgcgctcggtctgcccagcccgaggaaggaggcttgaaggcgggacagggattttgggggagggtgggagaggggtgcgcggtttttttgttttttgttttttgttttttttgcacctgcggcgctttcagcgtgcgggacccgggggggtcttggccagccagcccggagctccggagaggtggcgggatttctggcggccgcggtgtttgtattttgggtgctgcgtgactgcgttggctctcagcggtagttccctccctttcctaaatttaatttcatttttcccccttggtgcaagctgtgtttaaaaaaaaaaaaaaaaaaaaaagtggccctgggtatagcgatagccactcttcagattcccaaggtccttattttgggagaaggaagaaaaacagagccccagcctgcgttcctgatttgcaagatcagggagggaagaaggggtactttgtgattcctgctgggggaccccggacgggaggagcgggtgcgatagggagatctttgtgagtgattttgcaaaaacagattgcgaggttggttggatttgcaacctgtggctctcctcaagggagggagtaggaatggggaaaagcggcggcggcggcccggggagggagtgggttgagagttggaacctaggaaatgggctgcctggggggcagtgggagctggaggccacccctgccggaaacagtgaacgttaaatgtcttgagaactgcgggttgcgttgcctgtataataccgcgttattggaaccctggcgagagatggagctagtgttgcaaaaatgagttttaaaggtcccctatgaaaaacaacagcaccaaacaatattattttaacagtaaaataaataatctctgtgttgcgctccctcccatagaaatttagtttttgtgctaggggtagtgagaaatgacctcaagcccggcgctggaactcagaagcagttacagggtccttgacaagcatcgcaccccactccctaagaagtaattttatctctttttccccttcaaacattgtatagttctcataggaaaatattgcaatgccagtgtatattactatccacaaaaaaaagaaaagagcaaggaatggaaggggggagagagagagaaggagagagagaggagagagagagaaggagagagagagagagaggagactgtttagaaatacagtttgtggctctgagctatgcctctggcttcctctgcagttcgctggtttccctttttctttgcgaggtgtgtggtgtgagtatgtgtgtgtgtgagtgtgtgtgtgtgtgtgtgtgtgtaataaacaactttaaaataggggagggggcagcgtgatccatccagagacaggtatctattttgctcacaatttactaccaagtgcctttggcaggcacttgagcaggacctcataagcctgcagaccaagttgaagttcatctggccctagtccacatgctattcctggaggtagcaaacttgagctcaaaggagttaggtgaaattgtattcttctttatataccgattttaataaaagaaggaaagatatttgtcccgggggggtggggggagaggaannnnnnnnnnnnnnnnnnnnnnnnnnnnnnnnnnnnnnnnnnnnnnnnnnnnnnnnnnnnnnnnnnnnnnnnnnnnnnnnnnnnnnnnnnnnnnnnnnnnnnnnnnnnnnnnnnnnnnnnnnnnnnnnnnnnnnnnnnnnnnnnnnnnnnnnnnnnnnnnnnnnnnnnnnnnnnnnnnnnnnnnnnnnnnnnnnnnnnnnnnnnnnnnnnnnnnnnnnnnnnnnnnnnnnnnnnnnnnnnnnnnnnnnnnnnnnnnnnnnnnnnnnnnnnnnnnnnnnnnnnnnnnnnnnnnncccccaccccctagtttataaatagaagtttccagcatcctatttggaagattttcttttctaatacttccaggcattggatgattttaaagatctgttggtagtgacagtaaggttagatgctgttcaagacaaccaagtgacttgagcagagacaaccaggaaacgggtattcactaaatactctcttcctcacctcaggtttgaagggtttaccagagtgttttcttgaaaagactaatttattctggccttggtggtcaggaatggcatcctaaatttctaagttgtcgtttgctgagccccgaggagttccagttatgggttgagccatgactagatgtcaaaatctttccttccctctgtcccctgctggggatatccccctcggttgtgaaaaaaaaaaaaaaaacaaccaaaaaccaaaaaacaaaaacccaaaaacttaagtttcaggggaggtagtgcggcagcgccaccccttggtgagtaaaactattggtaaaagtcaaatatttgaaaaataattgtgaaataagcctaatgtgcttacccctaaccctgagagagagagagagagagagagagagagagagagagagagagaggaaacttttaaaatcaatactttgcagttaatctttcaaataagatagagacacgttgttttccaaactagaatggtgtcctaccaggcgatgtccttcccataattcaagggacaccctttcaggagtggagatgaggtgggatagaggtggggcttatctgcgacttctctggattgatgtagctattttcctctcagacttgacttcaggtaccgcagtagattgacggtctgactctgagctaaagaggagtgtgtgtgtgtgtgtgtgtgtgtgtaaaaccgtagaactgaaagtgttgtagtttccccgggggccgtggtggcttgtgtcgaagtgatgggggagaggtttgtggaccgcagggaacagcataggctgggttgtgagagacaaagtagcgaggcgcgtgccggtttcctacactgcgcaacaagtgggaccgcagcagcgacaggcgactctgcatactagctctgctggttagcttctttttgctcctcccaacccttcctgcttcccgatacggaccagtagcacctccaaaggccatattctgttctgttccgcacccgctttgctcagtgagtgaaagggctgacctctggtccccacttcctctgtgggtatgaaccatggggttattcccgatttttgctcccctccttctctctcccgccctccccctctcactgtctctctctttggcacgagtctctcttaatactttcaggtgtggttctttttgaaagaatgtgtagccagctttgaggagaggaagaaaggaacaaataaccaaataatatacggctcctgacgccgtacggtgttagctagagtcatgagcatcggaagaacggaattacatctactcaactaaatgtgttccgacttcagttttggaagcaacttccccccacccccaagagagacaaaaccacggtggtcaggggtgccgagtgtagaaggcgatgctaacagggtgattcttgaatggactgagtccgccacctagtggtaggtcacgctcaaggtttgcgcccgaagcggtgttgtctggatcctggtcagacgctaggactgaggaggagaagggcattgtccaatgaagacagcatccgacttccaatgttttgacgagacagatgaaaatcatattcccacgacgtcgacatacaccgtggctcagccatcagtatctatgtcaactgagaaacagtactttctttaaggatatttgtggcctctccacagagaactttagtagcggaaagattgcacccaaactctcaggagctttaagatttaaacttcattgcaattgtggcatagggcctgacagtaagtttctgaactccaaagaattcaccaagggagttcattccagtctatctaagagaaggggagagcagtttaatcttgggtcactggagtatccagtgcacattggaaactgccccctcccagtcttagcttaaaggttttgacaatggacatggaaaggtgacagaggtgtgagcaggtggggcatctctaagctgtggtgcttgttctgggagttgagtggccagaaactacttggtctccttggggttgtgcactggctttctgtaagtttgaactccggactcactctcttttcacccagtttattctttacttagtggcctggggagaaattagctgtgtgtgtgtgtgtgtgcgcgcgcgcgcgcgtgtctgtaggggttgtgaataagcagagctttattctttgagaatttgtagcccatctcctccgtaggttttggggttttttttgtttgtttgtttgtttgtttttgttttttgtttttcccctcaaagctcttaaccgagatggcccggttgcaccgacgcactggcggcctctagtggcgtcctcatcgcagagacacagctgtctcccccgccccctccccccaaccccccgccggggccgggaggaatccagttcatcttctatcactgcgggagttgtcccaggccgccgcggagaaatgcgcctctgttcgggttggaaacgaatctggggacgtgtctgaagcgcggtcaagtttgactcatcgctttccaaggacagttagtgccttccatcttcattaacgtgaataaagaccttagctgacttctgtctagatcgaatttaaaaaagcattgtttgcttggggagatgatgcctctcttttcctgccccacagtaccccgcccaccccaacgccgatctcagtccggtcaggatgagggaagagatctcttctgaaggacatggtttgctggcattgtcagcagaccttctggaggctgtctcgaccaggctcgtggggagcgtcccttcagctcttcagctcttgatgataaaacacatccctttattttattgcatttcctcgaagcttgtaggctagcaagagctctgaggcaggacacgtaacagaaatgaaagtcaggacacaaagtcctctggttagctcacgcagctgcggatccatcgcactatcaacttctctttttatctctgtgtcattcccgcccagaggcaagagcaacaatattgtccttccctacctccagaacagaagcaacactttgactctacccattttcgccagaagaggctggctagacctgagcaccctgttgggaaagagcgctcctgctggagctcaggggcatgtttcaacgcgtcatccctaccctcctcccgccttcaaactccttggacagtgatttacattttatgaaccctctttagatttttcggagagctattgaagttattagactaccaataacccaacaaccatcctgggtagagagaagtggaaaagcgttctccaaatccagaccctggccaaactaggtcaatgggaaggaggggcggggcgagcagccggctatggtttcaagccttgatggagagctccctctagcgttagacagaagtccagtaagtgagaatggtaactcctaggatattcattcctgtcccatataaaattacctttgtcaccgttaattcataccgaaggaaaaggaaaccacaaaacagggaaccagacagaccccgtctctgggttgcgaatctgatcccgcctccatcactgaagggatgtgcagtgtaacgatgctacccgttacttttaggactggatggaggttgtgcagacctccccaaaggcacaaggctaccgagagcacttagggggtggccacacggagttcatttctgggaaggcgaggcaaccctgctgtgtgtcagaggtttctctggggtgggccctgttacccagtctccacggtttcaggaaaataagacactgaattccggagcacgtctggcttcagtctggtagctccaactctaaagaaggttgggcggaaatctcccctttcttgccgacgtagactgaaggggttttcagtttacttttttttccaggtttagtcctcccccactccccacccctcgcgccccaattcggccaggtttctccaaggatggagactcttagtcccaggacacaatctttttggccttaatttcttatctacccattcccttctaaagcagggaaggaggtagcaagcgggaagacagaaagaaaacccaagaaataacatcaagaccctaagacaaacaataacaaaacaaaagcaaacgaaccctagcacactcagttgccagaatagggcaaaatagaaatcctgaagcgagcctctgactgtctccagactcttggactctgctctctgcggcttttagcttgctgggggcagggatagggacagagtagactcaggtctggaacccggaacccctgtagacagcggatttaggggaaaagggtgctctgtccccggtcagctttgtgcagccagcgatccggggctgggctgtcaggccgcggcttcctggaaagttacttctcgttggagaccgcgctgggcaggagtgttctgtgaaatccttagagccgagatcgactacgttccgggaatgagagggctgtaccattcccctggtggccccctactttgacagaataacaggaaaagaaaaaaaaaaagacacacacaatgctagctacggaggtgcaggaaaacatttatttgaatgtaaccaaattagttgttacagtcctaccactcggccccggccgaaacttccctggcttcgaagtggatgggcagcagtgccagccgatcgccagggggtgggcggtcccaggaagacaggtacagctaggtgcggcgagcgagtctgcgcaagcttgcctggcatcagggctggggtttgtgcgggtgtgtgtgaacaggctagcgcggctgccactccactcccctccccaaagggaaagaaaggagcattggctctagtgctcttttcccctcgactctcagattctctctccctctctctttctgtctctcttccttcccactggaaactccttacttgaagctgccttattcaaagcacactaggaaagtgccccagggagggaaaggatgcatggatgggttagtttacgtctcagttggggattactgaggctggacccggcattagagggaaacccattctggttcagctgtccttgccggtctgactctccttggggttgtttgcataggactttattggagaattgttttgagatcttgggcaagagcttgttttgggagcctcagtttcctttatagtgaatcctggccgttataaagatgtggtccaatgatgagcgggagagggaagagtgatttgtccaagccagctgaatggggtagggctttcctatctgcagtgtctggaaggaagtagcattcagctccagagttagcccccaccctagggagttgtggaacctgctgagaccatttggctgacagagaagtgaatcttttgagagggggtgattccaaagagcagtctgccctcctgtgtgcttgggctttgttgatggagaggggcttaaggtaaaaagcccaaggccagcctgtcagagtacatagaagggctacctttgttggttggtttgtttgtttgttcgtttgcctcgttccttgtctggagtgagtcattaccacttgtccgtcccggtgaaacggcaaatctgggcttcccgtggttccaaaagtctgtgactggaaagccacaagtgagctggtggttgaagctcagcccgacgattccagaagggcttgtggagctcttccacaggaagcaggagagagttagtaaataaacttcacgtgtcttcagcatttattttcaaaagagacagtcattggacctgggtgaggaccaagtgaactcttttttgctcactctgagtcaggacgggttcaagaagaaatcagttccttttgtctttttctgtcctctctccccctccatttcctaccccagacccactcactcactcactcactcactcactcactcgcacgaatgtaataaccttgaagctgaagagattgagtgactggctcttaagaccacagagaaatatctgagggtttggttacagagtcaaagaaacctcacattttaaagtgcacatttgggtaagactcgacaccatggaacgggcaaactttgtgtgggcaaagtagtttaaaactgagactcacccacctcagggtgctgccgtccgtccttcgtgtcctacggcacgtaggctgacttggaaagagtacaggaatctgagccagaagacctagggccaggccatcaactatctaggtggcccaacatgacctcgctggccttaggtccctttactgggaaagcagctccaaagggctgtgctgtttaaatgggaggacagagttccaatgtattatggctcagtttttgcagcccacattcgatcatcaaggagagtcttgcacctctgcttctaatggtttttgttttagagaaaccaatttggagagagtatatatttcattaagtctctcgaaggctccctggccagttctcagacaaaccacacagctaaatctttcaccagccgggagaagctcacacttggaaactatggtcagccctctgtccagttttagacctggaaacagagggaggagggaactttgaaaaagagggcaaagatacccaaggaatgcataaacatggcctctcgggttttattctagagttggtattcagtttgaagcgttccagagaatcaggaaatactgcctggctgtttgtcccaagcaagtcatttgaaccctgagtctcaatttcatcaccagagaaataaggataaagatattggccctatcagccttgtggaatcattctaagacttgaaagataatatttttagcaagggtttgaatagcatccagtgtttttaggtccctgaagaatcattatcattaatattgaaagaactacgttttttttcctttcccataaactcaaatggccttttgatgtatatatatatatatatatatatatatatatatatatatattaccctaagaaaggaaatatgtgtatacaggtatatgtaattaatgtatgcagtgatagttctagcactaagggtaaggcattattactaaacagctttgaatgcctgttgtttctgtaagaactgagctggaatatgcttgctagcttgtgggaaaacggcaccagctggcaggctgcagctatcaaagcaaagctagctacgtgtgtcctaaaataagaccggagtggacaatcttacgctcatttagtcaatctctgcttgctctcttctttgcagttttaaagcaaaattttggactgtgaagcaaggcactgggtgagtaaatcaaatcaaatcaaattatatgctctaaattttgtaggtgattttttttctcatgaattttacccgtgtgtgtgtgtgtgtgtgtgtgtgtgtgtgtgtgtgtgtgtgtgtgaagtttgccatcttagacttgatgaacaaaggatattgaattctctccatacaaatctcaggtttcacccctctggcccttcactaactgacttcataccgttgtatgtatggtattatttgtccccgtactctttctcagttcaggctaacctggttgcctacagtgccaggattataagagtgctaagtactcaaactattgaacgaaaaaactcacaatctcagagcatgggatgaatagtgaaatgacattccgataaaaatagctacacctttttttttttaagaacttattatggtgtaggcacatatttctaattttaaaaaccacataggtattgctgctcctattttggaaaatgaaagctcagaaacagtaccagcacactccaagtaacagagctggtgaaaggaaaagcagcctgggtaactctccaagagtggttttctccattgcaacacactcagggcctctcaatgcttggcagagtgtttagtatgcggaaaagcactttacaagcagcccttcccttcccctttcccccaaagagctttctacactggctttcattctccccatttgacagctatgcaaagcaaagtccagaaatgggctatgaattgtccactatatacctgagttgcatgcgatagcttatcaggctaagtcatctgcttggtcctcccggtaggcagggactaggttctcaaggagtaataggagttttaacgtctgttcaggcaaacacaacatggcctccccggctgacagctgtatccagtttacccggcacgctagtgatgttcttctcaaccttaatcgcctccggagtcgggacatcttgacggacgttgtcatcgtggtgagccgtgagcagtttagagcccataagacagtgctcatggcctgcaggtgagtggtctcggcatgaagggactgcagaaatggggatgcttggattgacagccagtgagacaaatgtataggccattctctatgtccgagatgacatttccttagtctccagatctcagcaaatggcctgccattgtggactctcagaaacaattgaacgaacatacctttggaaaaccattgctgttctgaaggactagtgagtgaagaaatcttatgctatcaaagccaaggtgcatttgaggccagcagtgagagtatcttcagttaaccggaataaggatgaaacatgagagtttctaaatagtttaaccaagcttgaaagctttttggccttttatgccatgactgtattttattttttaaaaattgcttttaggtttttcaagatatggtttctctgtgtgtagccctgactgtcctggaacttgatccatagacttaggctggccttgaactcacagagattcacctgcatctgtcacccaggtgctgggattaaaggtgtttgccaccactgccctcaaaagttttttttttggggggggggctagagagatggctcagtggttaatagcactgactgctcttctgaaggtcctgagttcaaaattcagcaaccacatggtgtctcacaaccatccttaatgagatctgacaccctcttctggtgtgtctgaagacagctacagtgtacttacatgtaacaataaataaatctttttcaaacaaagttttggagacagggtttaatatagattaaactagccttggatataatacttagctaaggctggccttgaaattctgatcctctcaccgcaagtgctaggaggataggtataaaccaacatgaccagactattgtacttaatttatactataattatatttccatggtttaagcatagagtgagtaagccagcttattcttcaaatatttctgaatttcaggttttctgtgctgtagcatattaagtcatttctaaggtcttcctactagctgtctattgcgtatgacactatgtctccattctgcagataatgaaagcaaggcacatgtctgtgtaatgatgtagggctctgtgttgcaattagagcgcttaaccaatgtctaataatagcatttaaaaaaaaataatgggaagggctggtgagatggttcagtgggtaaggacacatgccaccaaacctgatgtgacctcaggacccacatggtggaagcagaggctccacctcatcctgtcacaagttgtcctctgacctccactcacatgacatagtatatttacacacacacacacaccacatacacacacatacacacacacacaccacacacacacacacacacaccacacacacacaccacacacacacacacacacacacacacacacacaccacacacaccacacacaccacacacaccacacacaccacacacaccacacacaccacacacaccacacacacacacacacacacacacacacacacacacacacacgagacatagccagagacagagagacaggaggggagcaaagagacagagacacagagacagacagagacagagacagcagagtacaaaagagacagagacagacagacagacagtgagtataaagatgcattgaaaatgtaaaacacggagatatagagatataaagtgacagcgagtgttcagtagttatcatgacctgcctcagtgtgcaccccaacatagatttttgttcttgccacaaccctattaagcacatacacaaatatccctttacttagcagataaggaaaccaaggcatagagacggtaagactgttattagccacagctgaagagctacttcctgcgaaaggctcttccttggctacttccttggatcgcttctggcaacccacccagaatgagatttgtgatgacagtcattttaatactaattgactagacaacatgacctggaggcatggcttgggattagacttgaattttctaggaataattgactttctggtattgttggacttggagcaaggccgtggagtataaatatgcatacatcaccattgtccatcctcaactcactcctcacgcaggagattcaaaaactaaggctattgtgataaagcaagggaaatactgtaccacacacacgaagtaggagcagatgagtgctaagttagacaagagaaaaacagcaccgtggccccaagcctctctctcagactctgctagctcagtttctccgtgtgtaaaggtagaatatggtggcacatgctgtgcaggattagggagaatgccggttaatgtaaacttgcagaatgcttcaggaattcctggagtctgctaggctttccacgtgtagaagtcattcgtttgtgccacagagctttgggatctgggccccagggaagattagacacagatatggatgctttgtgaccactacagtggcgactctgcttgttttacagcggcctgttctacagtatcttcactgaccagttgaaatgcaaccttagtgtaatcaatctagatcctgaaatcagccctgaggggttttgcatcctcctggacttcatgtacacatctaggctcaacctgagggaaggcaatatcatggcggtgatgaccacagccatgtacctgcagatggagcatgttgtcgacacatgcaggaagttcatcaaggccaggtgagctgctacattgatggaagctgtggatgcagaaaggatggttccagatcagaaatcatgcatgctgtgatagcttccgcaccacgtggcacctcccttgcttctctttattcacatgctctaggcagacaccattcctgcccagatgtacgacccgtgtgcccccaccccatcctcaccttatttccctttagtccttcttcccacttgccctgtaaggcccaaactggaagccttttccatggcccttttgctgacatcctcagctcatctgtgtttggcgggcagccttttgcttttccttccaacctgacttctaacattggtctatatatgtgaggactccttcagccttctattataaccatttctatatgtgcctccgttctctactaaagcccaggctgtttgagtttacagttgagttgaaatttgttcttcatctcagtcatcatgctcatgtttggggggacacttcatggatagcaatgagttgactgggtcaaaccctccacccaaaggggtaggagacacggtcattatcagaagacaagatcctgagagttgggaaattgaagagccttggtaaatggagcaggtacttgaggcttatcttcttcagaaccacgtgactcagcagctttgggctagctgcctgctttcttagcagaagggatttccagtctatgtttgaccacgtccaggacctaggaactcacattgtcacaaccataggactgccttgggcagctgcagagtctctctttaccacctcgtgaagcctggctccgttaatgctactttctgatgccagccctgttagtggagagcttgttgatctgccctactttttcacccacacaactcctttaagtatttgcagccagtgtttttgtctccagtgggtgctaatggcggcaagtgcatcattgctgtcatttgggagtactttacacaggctgggccttgcgccctgagcagttaagcaacttgctccaggtcagagctgggttttgcaaatcaggccaggctgctccatcaccagggcttttgtgctggtcactgcctgctcatcttcatcaacctctctgaaaaaccgctgaacatacggggcaggtcttttagttgatacactctgaatgtatagtgccaccattgtgtgcattcttccctcctagcttttgtatcaaatgacctgcttttccttgaaggagttttgcatgtgggaaatgagataagggctttaaaaggtttacataacccatataatttttacataacccatataattctatataatcagaagacttacagtttccaagacatgcatatatatgcgcctcatatttacaagatccaatgaaacacacgttatatgagtggctctttctcctcggtttccccagccatgcctcagctggctaacttctgggtataatgtcctataagtctgttttccgactccagagtcacatctcccgagtctcactgactcaagcacagatgtggctttataacagtgtcactggaaggtcatctgttttaacagttctaattttgggtcttttttttttttttaatcccccacagtgaagcagaaatggcccctgcacttaaacctccccgtgaagagttcctgaacagccggatgctgatgccccatgacatcatggcctaccgaggtcgtgaggtcgtggagaacaatatgccactgagaaatactcccgggtgtgagagcagagcttttgctcctcctctgtacagtggcctgtcaacaccaccagcctcttatcccatgtacagccatctcccgctcagcaccttcctcttctctgatgaggagctccgagatgccccccgaatgcctgtggccaacccttttcccaaggagcgtgccctcccctgcgacagtgccaggcaagtccctaatgagtatagcaggccagccatggaggtgtcccccagtttgtgtcacagcaacatctactcgcccaaggaggcagtcccagaggaggctcggagtgacatacactacagtgtgcctgagggccccaagcctgctgtcccttctgctcggaatgctccatacttcccctgtgacaaagccagcaaagaagaagagagaccttcttcggaggatgagattgccctgcatttcgagccccccaatgcacccttgaaccggaagggtctggttagtccccagagtccccagaaatccgactgccagcccaactcacccacagagtcctgcagcagcaagaacgcctgcatccttcaggcctctggctctccgccagccaagagccccactgacccgaaagcctgcaactggaagaagtataagttcatcgttctcaacagcctcaatcagaatgccaaacccgagggctctgagcaggcagagctgggtcgcctctcccctcgagcctaccctgcaccgcccgcttgccagccgcctatggagcccgcgaaccttgatctccagtccccgaccaagctcagtgccagtggggaggactctaccatcccccaagccagccggctcaataatctcgtgaacaggtgatttcagaggccctgtgggtctaaggtcaggggctacccaagcacagttccaaggcctcatagcttcagatggatgcagagggcaaggttgttctggttttctgcctgaaatgctcagggggatgagcaccagagtgagttagcctgtgtcagaactgaccatgttacactgaagttgtatttctgtttcattttccttccttccttccttctttccttccttccttccttccttccttccttccttccttccttccttccttcccatccctccttccctcccttctttctttctctcccttcttttctttccttttttctttttttctttctttgtagcaggggagatcattcccttgtgtgggagaaaaatattccacaaatcctagaggcacttcctgtggtcttgatggagcagggaacccatcttttaagactgagaaaggctttaggccctaaggagaagcaactgtgtctggaagtggaagttgggcatttgttgttgggctctgagtcttagaactctagaaggcagttctggtctctgggcttgcctgagagacacacagagagaggttagcatggccaccacgtggactactcttcccagatgagtcctgaggctcctttttcctgcccacaggtccctggcaggctccccccgaagcagcagtgagagtcactcaccactctacatgcaccccccaaagtgcacatcctgcggctctcagtccccacagcatacagagatgtgcctccatactgctgggcccacgttcccggaggagatgggggaaacccagtcagagtattcggattctagctgtggtgagtctctttctcctcatctctctgaacgccccggaaaagaggcccctctgttccctggcatgtgtgtgctgctgtctctgggacatgacccagattagaaggcctctggcacttaccgtctccagcaatagttatcctttctgtctcccaggaactgggctgattcaagcaagccaacagggtttaggtgttgaactgggataaccacgctccagcagaggtagcttgcaggacggctggaaccctcagagctttctcagcctgtctgtgcccaaactactgggtgtgtgatagcatttcctggtaggttgtcagtcctctgtgaagaaatagctggccttagtcattcatgcatctcgcactgggcctcagttggctcctagaatggcagaggtacttagaaaatgtctgctgaattaagttcgttgaacgaaattattaattagcatctccacatggtcagtattggctccctcagttcttaacctggtgaaaagtcccactcttaactcagctctagttaccgtcttttctgactcaggaaatacatactcagggttaaattacactgatataccattctcagaagattatggcagaataaagaagaggcttacagtgagccatttggccctaggttacaagtcagggagcacagggactgtgcctgcctgtccccagatgattttcttattctgcattccagttcctgtcactgggcctctgtttgcctttctgccacctttagtgtcctggggttacaggtgggctttgaagacgtgaaatctagataggcacaaagatggtggtagggtcttcatcttcagttccttctgggagggacttacagggttagaactgtgtctcatggctcttgaggctgtcattcttttctgatgtatagtgtgtttctatgggtaggcaggacagggcatattagctttgctttggagacagagacagggagaggcttagggacgtcaagtgtcttgccccaggactgctgtgtatgaatagaagttgaactatgaacctgtttgtaagagctcccagagaagaaaacctaaggctttctcaaagccatgaggccctaaggagagtctctggagtgaaacgtgtttaccttaagattcaatctgtctcctgtcttgctcttttctgactgagactctaaaaaactaagaaaaataaaagtccctactggtcctatgggttcccataaacgttgagaaggagcccaggctctgctgagacattggcagagttccagaggcgggaggcgtccgggctccgccctgtctcctcatgctaaccaggcatccctccatgtgcctgcagagaatgggaccttcttctgcaacgaatgtgactgccgtttctctgaggaggcctcgctcaagaggcacacgctgcagacgcacagtgacaaaccatacaaatgtgatcgctgccaggcctccttccgctacaagggcaacctcgccagccacaagactgtccacacgggtacggccttgtcccaagccgagggctctgtgatcggttacaggcaatagatcttaggacaaacctggggacttggttggagggaggcaggatgaatgccccaccctggcttcaactagggcagcagtcctcgagctgtgggtgttgacctctttgagggggggtgtcaaacaaccctttcttgggggtcacacatatcagatatcccacatatcagatatttaggtcatgtttcacaacagtagaaaaattgcagttatgggttagccatgagtataatcttatggttgagggccaccacaacaggagaaactgtcttaaaggctcaaagcatgaggaaggttgcgaaccactgacccagaggattaaccctgtcttgtctctttccttattcttttcgcttcctctgtggctttgccctgcttctccccctttgctgggatttgaagcattagtcccccctggttgagtgaagagactaatgctgataaaggcaacatggactgaggtttgggtaaagccagctaaaaagaaaagcctttcagtgtcaaggacttatcaaccaacttaacgttccttttcctggggactcgtctcacagtctctttgttgtgagcattaactagctctcagacctttcagtggccccattatccccaaaactttccatggtggaaggctcagccgtagattggtttcctctgcccggcctctgctcagccccacaccctgccttgctagcaaatggaatacagctgtagttgccacaagcggaaaactatgttctgagagagactagagcagcctgattttatctctctggtgagtgagtggatattgcatcaggctggccaaggcaagagccagaagaatcatcccaggttgtctgaatcagccctgcccattcagagagggagaccgaggtccagagaagggctgggtcttgcccaagccccagaggcagtgaccctaatgacaatggtggttctgcaggccagacttcttgaaccttctcccactgtgtcctgtgtatagagtttccaccccaccatgcccaactgcttgtgtcttgaccttgtcccttgcaatgtgtgttggcgtgtgtggtaggcacctagatcagtggttctcagccagtgggatgagaccccttgggggttgaatgactttattttttacaggggtcatctaagggcatcagaaaacatagatatttgcaatatgattcagtacgattcctaacagtagcaaaattacagttatgaagtagcgacaaaaatgattttgtgattaggaggggggaatcacaaatggggtcacagcgttaggaagttgagagccactgccctccctgtagggaagggaggcattcgtggccttgtatggaagtaactgccttgaaattaagagtcattggagcccccggttagagatgatttcctttttcattcgtcttgtcaatcaataggtgagaaaccctatcgctgtaacatttgtggagcgcagttcaatcggccagccaacctgaagacccacactcgaattcactctggagaaaagccctacaaatgtgaaacctgtggggccaggtttgttcaggtgagcagggtagcatggcgaagggaccctgtggggaatggagacctggccataggcaggcagccataggcaggcagcacctctcacgctgtgctgtgctccccttcaggtggcccacctccgtgcccacgtgctcatccacactggagagaagccgtacccctgtgaaatctgtggcactcgcttccggcaccttcagactctgaagagccatctgcgcatccacacaggagagaaaccttaccatgtacgtaaaccccgtggctcctgccatgtgacctgggcgggggcggagtgggggaggggtacacagcaagtggacagcagagctgcttgctccaacctctagtgtacacatgggccagtggtcaggagatctaggcctgcttgattgtccaagttcccgtcttcaccaatcccaggtctcagtgtgttcatctctgacacagaggcattggtcctgggctttaggagaggaaacgtagaatcggcttagtcattcattccacagatgttttctgagcatctccagcatacctccacactagatatgtatgtaggagcagtgaaggtgttaaaggaagcttaggagtagagcaaccagagaaatatgacaaagaaaaaaaaaacagagccaatatattaaaaaatactgtttcaagaatgagatggccgggactaggggggtggttaagcagttaagagcacttgcggttgtagaggagtgtccagttgccagcacttgaattgagtggttcacaaccactttaagcccagtttaggggattcagctccctcttgtggcctccccaggtacctgcatgcgtgtggcatagatatagattagaatacatgggtgtcaataaggataaattcaaaagaaagagcaggtgcctgcacgtctagcactgctaagaacaggatgtaaataaaatctaattggagggcagccatgcctttgcgaatcatataaggacgctttgacgcaccaatggcagcacttcaggtgctggcagggcacaagagcgaatcatggaatggttcacgggcacccagatggcaaggttcaaactgtgccttctttcgttgacttgcttctaaagctttgaatgaagggctttgtacttgccctttgtttcttgacaaattcgctatctttgcccggagggctttctgctttcctcacctctacaccgatttagaaaacagtgcctatgtcataaggtggccatgtttagggaactaattcattcggtgctttgagtttctcaagcacatagctgtatcctgaactgctagaattttagtcttagtggcagtaagagttgaaagtgctgtttggatttgattgacacaatcccgtacagaagggaaagccagtcttgagagatgatatgaccagtatacacagcagtgggtgacacaggtacaggggacttatgccatttggaaataaagaaaaccatctcctagactcaagactccccatggatttatgctatttagttcatttgtgctgctgcaatcggattgattttgcagttttctgaaggtatattctgctaggtcacagggaagatgaccaagtttggttgagaagtacttcaaagtatgcaaagtattcaaagccacatgatgaagacatcagtaccccagggcagttgtgaggcaaggctgaaactctgagagctagaaagagatggattatttcatcttagattcagaaatgtttctaatgggggcagtctatgcatctgaacttatcttttggataagacttgtaatcatgcatttaagtcagggaaggacatcttaagtccgagggacccgtgagctgaaggggaggctggggcatttgcacagtgtatacctaacctccagtggaagccaagatttgtatggattctaaatctgccctttgagagggaggaggtgcctgcacccaaccctcacggagttgcctctcttctgggcttttgagcactgactcgtttctcgagtggatgacagctaacacttggcttctgctgtctcttcagtgtgagaagtgtaacctgcactttcgtcacaaaagccaactgcgacttcatttgcgccagaagcacggcgccatcaccaacaccaaggtgcaataccgcgtgtcggccgctgacctgcctccggagctccccaaagcctgctgaatgaagcatggagtgttcctcgccctttcctctccagccccttctcagaatctacccaaaggatgctgtaacactttatacaaaggtcatcccatgatgtagtgcctctctcatccactagtgcaaatcatagttggggtgggggtgggggtggggtttgcgggaccgggagccaaggcagctccccttcccacactgccataaaacattaagaaaatactattgcttcttctcctatgtgtaaggcaaaccctgtcagcaaaaagcaaattcattttctatatcaaagtaggggagaatgcagaagttctgacttgacaggttgcaaccgaggaatgtaaatgatgtgtgggaacagaggtctcttttgtatgtaaatgtgtattgttttaaaagacaagacttcagtatgctgtcaaagagaaggctttaatttttttaaccaaaggtgaaggaatatatggcagagttgtaaatatataaatatatatatatataatataaatatataaacctaaaaagatatattgaaaatataaaactgtgttaaaggctcgattttgtatctgcaggcagacacggatctgagaatctttattgagaaagagcacttaagagactattttaagtattgcgtctgtataagtaagaaaatattttgtctaaaatgcctccgtgtatttgtatttttttgcaagtgaaggtttacaaatttacaaagtgtgtattaaaaacaaaaagaacaaaaaaaaaagctgcagaaggagaaatgtatacttttgttccagttttcagtttgtacatacctgtaatgtgtcctcacggtgcctttttacacggaagttttcaatgatggacgggtgtgcgccatccctttttgaagtgtaggcagacacagggacttgaagttgtcactaactaaactctctttgggaatgtttgactcctcccacattctgcgtcatgcttgtcgttataattactccggagacagggtttggctgtgtctaaactgcattagtgcgttgtaaaatagagctgtacaaaacataagaataaaacattgaaaagtc

SEQ ID NO: 84 - DNA, 3388 bp, Mus musculus
gctgccaccgagtcctcccctgctgcggagcaatggtaaagcccgcagctcaaattccgagaattgagctctgttgattcttagaactggggttcttagaagtggtgatgcaagaagtttctaggaaaggccggacaccagttttaaagcaaaattttggactgtgaagcaaggcactgggcaaacacaacatggcctccccggctgacagctgtatccagtttacccggcacgctagtgatgttcttctcaaccttaatcgcctccggagtcgggacatcttgacggacgttgtcatcgtggtgagccgtgagcagtttagagcccataagacagtgctcatggcctgcagcggcctgttctacagtatcttcactgaccagttgaaatgcaaccttagtgtaatcaatctagatcctgaaatcagccctgaggggttttgcatcctcctggacttcatgtacacatctaggctcaacctgagggaaggcaatatcatggcggtgatgaccacagccatgtacctgcagatggagcatgttgtcgacacatgcaggaagttcatcaaggccagtgaagcagaaatggcccctgcacttaaacctccccgtgaagagttcctgaacagccggatgctgatgccccatgacatcatggcctaccgaggtcgtgaggtcgtggagaacaatatgccactgagaaatactcccgggtgtgagagcagagcttttgctcctcctctgtacagtggcctgtcaacaccaccagcctcttatcccatgtacagccatctcccgctcagcaccttcctcttctctgatgaggagctccgagatgccccccgaatgcctgtggccaacccttttcccaaggagcgtgccctcccctgcgacagtgccaggcaagtccctaatgagtatagcaggccagccatggaggtgtcccccagtttgtgtcacagcaacatctactcgcccaaggaggcagtcccagaggaggctcggagtgacatacactacagtgtgcctgagggccccaagcctgctgtcccttctgctcggaatgctccatacttcccctgtgacaaagccagcaaagaagaagagagaccttcttcggaggatgagattgccctgcatttcgagccccccaatgcacccttgaaccggaagggtctggttagtccccagagtccccagaaatccgactgccagcccaactcacccacagagtcctgcagcagcaagaacgcctgcatccttcaggcctctggctctccgccagccaagagccccactgacccgaaagcctgcaactggaagaagtataagttcatcgttctcaacagcctcaatcagaatgccaaacccgagggctctgagcaggcagagctgggtcgcctctcccctcgagcctaccctgcaccgcccgcttgccagccgcctatggagcccgcgaaccttgatctccagtccccgaccaagctcagtgccagtggggaggactctaccatcccccaagccagccggctcaataatctcgtgaacaggtccctggcaggctccccccgaagcagcagtgagagtcactcaccactctacatgcaccccccaaagtgcacatcctgcggctctcagtccccacagcatacagagatgtgcctccatactgctgggcccacgttcccggaggagatgggggaaacccagtcagagtattcggattctagctgtgagaatgggaccttcttctgcaacgaatgtgactgccgtttctctgaggaggcctcgctcaagaggcacacgctgcagacgcacagtgacaaaccatacaaatgtgatcgctgccaggcctccttccgctacaagggcaacctcgccagccacaagactgtccacacgggtgagaaaccctatcgctgtaacatttgtggagcgcagttcaatcggccagccaacctgaagacccacactcgaattcactctggagaaaagccctacaaatgtgaaacctgtggggccaggtttgttcaggtggcccacctccgtgcccacgtgctcatccacactggagagaagccgtacccctgtgaaatctgtggcactcgcttccggcaccttcagactctgaagagccatctgcgcatccacacaggagagaaaccttaccattgtgagaagtgtaacctgcactttcgtcacaaaagccaactgcgacttcatttgcgccagaagcacggcgccatcaccaacaccaaggtgcaataccgcgtgtcggccgctgacctgcctccggagctccccaaagcctgctgaatgaagcatggagtgttcctcgccctttcctctccagccccttctcagaatctacccaaaggatgctgtaacactttatacaaaggtcatcccatgatgtagtgcctctctcatccactagtgcaaatcatagttggggtgggggtgggggtggggtttgcgggaccgggagccaaggcagctccccttcccacactgccataaaacattaagaaaatactattgcttcttctcctatgtgtaaggcaaaccctgtcagcaaaaagcaaattcattttctatatcaaagtaggggagaatgcagaagttctgacttgacaggttgcaaccgaggaatgtaaatgatgtgtgggaacagaggtctcttttgtatgtaaatgtgtattgttttaaaagacaagacttcagtatgctgtcaaagagaaggctttaatttttttaaccaaaggtgaaggaatatatggcagagttgtaaatatataaatatatatatatataatataaatatataaacctaaaaagatatattgaaaatataaaactgtgttaaaggctcgattttgtatctgcaggcagacacggatctgagaatctttattgagaaagagcacttaagagactattttaagtattgcgtctgtataagtaagaaaatattttgtctaaaatgcctccgtgtatttgtatttttttgcaagtgaaggtttacaaatttacaaagtgtgtattaaaaacaaaaagaacaaaaaaaaaagctgcagaaggagaaatgtatacttttgttccagttttcagtttgtacatacctgtaatgtgtcctcacggtgcctttttacacggaagttttcaatgatggacgggtgtgcgccatccctttttgaagtgtaggcagacacagggacttgaagttgtcactaactaaactctctttgggaatgtttgactcctcccacattctgcgtcatgcttgtcgttataattactccggagacagggtttggctgtgtctaaactgcattagtgcgttgtaaaatagagctgtacaaaacataagaataaaacattgaaaagtc

SEQ ID NO: 85 - protein, 703 aa, Mus musculus
MDADSCIQFTRHASDVLLNLNRLRSRDILTDVVIVVSREQFRAHKTVLMACSGLFYSIFTDQLKCNLSVINLDPEISPEGFCILLDFMYTSRLNLREGNIMAVMTTAMYLQMEHVVDTCRKFIKASEAEMAPALKPPREEFLNSRMLMPHDIMAYRGREVVENNMPLRNTPGCESRAFAPPKGLSTPPASYPMYSHLPLSTFLFSDEELRDAPRMPVANPFPKERALPCDSARQVPNEYSRPAMEVSPSLCHSNIYSPKEAVPEEARSDIHYSVPEGPKPAVPSARNAPYFPCDKASKEEERPSSEDEIALHFEPPNAPLNRKGLVSPQSPQKSDCQPNSPTESCSSKNACILQASGSPPAKSPTDPKACNWKKYKFIVLNSLNQNAKPEGSEQAELGRLSPRAYPAPPACQPPMEPANLDLQSPTKLSASGEDSTIPQASRLNNLVNRSLAGSPRSSSESHSPLYMHPPKCTSCGSQSPQHTEMCLHTAGPTFPEEMGETQSEYSDSSCENGTFFCNECDCRFSEEASLKRHTLQTHSDKPYKCDRCQASFRYKGNLASHKTVHTGEKPYRCNICGAQFNRPANLKTHTRIHSGEKPYKCETCGARFVQVAHLRAHVLIHTGEKPYPCEICGTRFRHLQTLKSHLRIHTGEKPYHCEKCNLHFRHKSQLRLHLRQKHGAITNTKVQYRVSAADLPPELPKAC

SEQ ID NO: 86 - DNA, 44307 bp, Homo sapiens
  misc_feature (1)...(44307): n = A, C, G or T/U
agacagatcgatagatagataatagatattaagcattttggaagataaaaaaagaataaagccgagaaaagcgttcataatcctactactgtaagagagctactgtaaatatttttgtcaattgtgtactattatttacatccagtctattttctacaaagaatatatttttaaaaattgctgtgaatatactgtatacaaatattatatagatatataatatgcatatatctctatatacatattctacttctttccactttacatattaccataagtatctttcaattctaatttttcgaaattagttgtattgtaatttacttaatcattcttcatccaacattctttcttccagcctagtcatgataggacatgtaggttgttcaaattttttgttgttagaatacagcgctaggatgcatatactcattcactgatttttcctgtatgttgaattatgcattaaagatagattcctagaagtggaatctctgggtcaaagggtctgcttatatttatgattcttggtatatgtggccaatatatctgaaaaagtcatactaatcaacacagtaggacctagtctcactgcacttcaccaagagttatttaaatgttggctttcacagtgaatataagtgttagttcaaagatcttataactacttggcagagaggccaatagatgtcagaaaacatgaagggaagaagagaagagacacttaaaactcaagtgcagcattagaagtaaaagccattgataactgacaattggttagaaattaaaaaagcatctttgaagtcataatgtacatcaatacaataacaggcctcagtttaccaaagtggatactgcaacaaaataaatgattcggggtgaactggtgatgggaatcagctctgccaccaatttgctaagtggtgtttgcaaattgctttcctctctggacctttctcaactgtagaactggtaagccgaaagatgaagatagatgctttcagaatttagagaattgggttgtactcagataatgcagacaaactcatagggttaaggggtctgataggagcttctcctctgtagacaccgagactcataactctgatgagatccacagttctattggagttgtgcaatgaaatagcagacactcttggaatctcttggggctcccccaacttcatgaatgaatctctaagttctgcatgccccatataaactgatgacaagatctttgagagcactgtttccttagtgggtttccacagagaaattttgaatatgggggtccacgaagtggcttgagccatctaccccaacaacaacatttggcctttggtgcctctctagtattctcctgatggttatgcagatggtggcatacagaaatggagtaaattagtaaactaaaagaataaatgaggtgccccatttctctgactctattctaggaaaatgagtgagaagcaggatctcccagatttcaggagagatctgggtcactttttgggagggttctggtattgaaaattatatatatatatcctccagctggatatatatatatatatatatatatatatatatatatatatatatatatatataacatctctatatgatatacgtatctatctatacctctatagatatctatagatatctatctatatctctatatgaannnnnnnnnnnnnnnnnnnnnnnnnnnnnnnnnnnnnnnnnnnnnnnnnnnnnnnnnnnnnnnnnnnnnnnnnnnnnnnnnnnnnnnnnnnnnnnnnnnnnnnnnnnnnnnnnnnnnnnnnnnnnnnnnnnnnnnnnnnnnnnnnnnnnnnnnnnnnnnnnnnnnnnnnnnnnnnnnnnnnnnnnnnnnnnnnnnnnnnnnnnnnnnnnnnnnnnnnnnnnnnnnnnnnnnnnnnnnnnnnnnnnnnnnnnnnnnnnnnnnnnnnnnnnnnnnnnnnnnnnnnnnnnnnnnnnnnnnnnnnnnnnnnnnnnnnnnnnnnnnnnnnnnnnnnnnnnnnnnnnnnnnnnnnnnnnnnnnnnnnnnnnnnnnnnnnnnnnnnnnnnnnnnnnnnnnnnnnnnnnnnnnnnnnnnnnnnnnnnnnnnnnnnnnnnnnnnnnnnnnnnnnnnnnnnnnnnnnnnnnnnnnnnnnnnnnnnnnnnnnnnnnnnnnnnnnnnnnnnnnnnnnnnnnnnnnnnnnnnnnnnnnnnnnnnnnnnnnnnnnnnnnnnnnnnnnnnnnnnnnnnnnnnnnnnnnnnnnnnnnnnnnnnnnnnnnnnnnnnnnnnnnnnnnnnnnnnnnnnnnnnnnnnnnnnnnnnnnnnnnnnnnnnnnnnnnnnnnnnnnnnnnnnnnnnnnnnnnnnnnnnnnnnnnnnnnnnnnnnnnnnnnnnnnnnnnnnnnnnnnnnnnnnnnnnnnnnnnnnnnnnnnnnnnnnnnnnnnnnnnnnnnnnnnnnnnnnnnnnnnnnnnnnnnnnnnnnnnnnnnnnnnnnnnnnnnnnnnnnnnnnnnnnnnnnnnnnnnnnnnnnnnnnnnnnnnnnnnnnnnnnnnnnnnnnnnnnnnnnnnnnnnnnnnnntactttgggttataatgtaaaacactattctattttgttgctcaaattgttgcagctttggccactgggagctcttcaagtggctcctgtgtctttttgaaatatccctcaccaatgtagttttgtttttgaataattccttactttaaggtgctacaagatctttcattctcatttgtgtatttcctgccccagttttagaactcaacaatttctccaagaagccttggttccagctgctgagaaatggcattaaaactgagaccagcctggccaacatggtgaaaccctgtctctactgaaaatacaaaaactagccgggcgtggtggtgcagggctgtaatcccagctactcgggaggctgaggcaagagaatcgcttgaacccgggaggcggaggttacagtcggctgagatcgcgccactgcactccagcctgggcaacagagtgagactctgtgtcaaaaacaaaaacaaacacaaaaacaaaacaaaactgagctctgagcaccaggtgtgcttgttgctacgacaaatatatttcaaaccttatatttttaacaccagcacccacacaactacaatacaattgcactattcataaaacaattatagattattaacaacattcaatcatggtgtcataggagcctgtggtcctacactggatcccacacacaaaacttgcatatgatggtcatcttctttcagtcctgttaggattgaaagagagatgtatagcctcagtggagataatatcaaaagtctaattttatttatttatttctttctttattttgagacagggtcttactctgtggcccaggctggagtggtgccatcatagctcactgcagcctcaaattcctgggttcaagaaatcctcctgcctcagcctcccaagtggctagcactacaagtatgtgccatcatgcctggctattttttttttcttccgtttttttagagacagggtctacgttgcccaagctggtcttgaatccctggtctcaagtgatcttcccacctcagcctcacaaagtattgggactacagttgtgagtcattgtgtctggcccaaaagtccaaatttgaggccttctttggatgtgtggccacaataaatggctcttgcaaggctgccaaccccttacactctttccataatatgccataagaaaagcatactggatttagaaatagggcatgaaagttctgaatccagctgtgttagtgttatagcatatatagcaagtggattgtgtctgggcctcaatttccaatgatacaaaatcaggaacatcagattggataatggctaaaggccctcccagttctagcacactataattttcaacagacttacactgggggaatacaattggctccactagtctttgtatacaggcctaatattccagaaagtctaaaccagtggaggcatgggggtgcggaggtcgcggctaataaatcagagtcattttattattttttgggaatgccaagacctgttaaaggctttagatagtctagacaatcgggcctgagaaactttagacctttctttttaaagaatgaagatcaaaaaagtataaaaaatattgatggaaagtatctctttcattggtttcatgttctgatagatcaagacttcttcctctttttttttttttcctttagtaagggaaaactcctcatctgctttttcctctgacttcaaataattacctttaatgcagtgatggctgagccacctctaagtttcttaccaggaatctctctctaggtttttatttttttctttttctcttccttccttctctcctctctgcctccctctcttatgctctccctccctcccttccttcccttgaatgttatgatgtgttttttacatccatatactacccagtgtacaaatgtcatctccttcctatcattgatggggacaatttgcaaaaacaaatagaaggaaaataaaaaaggaaatatagggcagaaaagacacttgggaactgtcacatttgattatgaatgctggagatcaaaggtgcaaggtcttagaacctacttcctccacctcttaacgtttaaaatcttcaattggcttttgaacccactcagcaaaatcccagactttggtctacaattggttaaaaattgatagagtgaggattctgggactgccttctttacttagaagtttacattttaactccttccctagccccaggtacacatatacacacagctcctttccactcctctcgcacagttctgtaaatatgttttgaaatgtaaaggtacagaactaagcgcagaccggcatccctcaaatcatcggggctattccttcacacagctgaggaaacggagtcctcacaagtggctttgctcaatgtcccataaagagtttcaggcacagctgtaattagaaaccaagggtttgtgtgtgtgtgcgcgcgtgtgtgtgtgtgtgtgtgtgtgtgtgtttgcaacaaatacagtgtttttttttttctccctacactgtgcccccgtggagtcacatttgtgtgtctgtgtctctgtacgtacataagttacacagacactgacatgtaggaaacgtgcaccaaagtgtctgtcttctgacctcaggtaacagtataatgacttgaatttcaggcagctgaaaggtttctgccggtggaggttgaaataaacaagaaaagccactgtggagatgtgaatggaaaagtaccgagccctccctccctccgcacattcttccgctctccagctctccctgccatcgagctggcttcagataggcttctgcatggtcaggtgtacaagagggcggtggggagaagaaaaaaaaaatgcaggcacaacacgcaaatcaagtttttccacttctagccttaggtagtagagacagctaagtacagcagccagcagcccggcaacggcagcgggtggaccagccaccctgagtttacaaacactcaagtgctttccttccctcatccctctcagagtccagctgctgctttccttcatgctaaggtttcataggaagtgaaaactctgctattcaaaacagcgatcgaacgcaataaacaaatcattacacaccccctaacccccatcacttctctattttaagcttctgatatttattcccattttaaataagtgagaaaagtgtggaaaattagtgtttgggggtaaactctgagccaggctgaaaaggtttctaaaggaaaaaaaaatctcagaacaataaaggctaaaagcaggcagcatatggatgaaaattaaacactgatacttccttttcagaaggcagtagctggaaattatacacttttttaatgtctcaaaactttctgctcatcttgctatgttaaaaacgcctttctttctccaaggatactacaaaaagcttgtttacaacagttctaaatgaaggatttgaaataaaacgaacaggtaaaatttaacaagtctgatagatagtgtctcccaaatctatcaaaagcagtgccaagtacttcaatgtagctgagaggcataaataaacccaaatgaccatcaaaactcatcatgacttggagttcgctctgagttttgcagtttacaaagagaccatggcagccttgcttccctcagttctacaaggacacaagatatacacctacagactcaagttgtcagattacactgatcctctaaaatgacagagggccagcaaatcatgcagacccattttcagttgtgttcctggggtcacacatgctcctagtgaagacccagcctataatcctgaaagaagaaagcctagagaaggtgattgatttgaaaaagtcttcccagttttaaaatctttagtcctatgatgtggtatcttaaagacctaccaaggtgccagaggttcctgacaggtgaaaccaacttcctcttgtgagcccccttagaaagaggacagaaccgtgtttattccaaggataggttctttttcagctatgactgaattgtggggaaggttttgcaagggggaattggatgtgaagtctgttcttttcctcaaatagatgtaatattaggaccaggctattttattttgtaataaagcttatatttacccagcagcaatgatcagggacctattcttatgcccagtccatgaggcaaagaggttggcctggtcctctactgagtattagcagccagtaaccattaaatcatgggactagttgaaatgtagtgccccgaagtctgcaggaattattcatacgaccccagacatggaatcactctttagagcttcttaaggatgatttaaaagaatcagaatacgttcaagtcagccctttctttaatcctgtaacacggcactgcgggagtgagggaggcccacatagtgatgccaactggatactgaggagaggtcaagaatgaaagaagaaatgacattctggaagaaattcaactggtataatatttgacaaagttactttcctaggaattgaaaagagattgagaggcgggtgcacaattttcctcaccattcattcagttcaaagtaaaagagactcaccgaaaagtaagtgcctatctttagaaaattttcaataatgattttctctttctttctaactggtcttctgttctggtcaatttctttcagtgtaaacacattgatttggcaaaaagcagtaggaaaatgtggcactctggcacttggtcccagaaataatatgctgggaagatttgaggtccctggtgatgaggttaattatatatgaaccagccctggtgggttctccctctaggggctcactgcagagaattaaagagggctgaggtatgagaagggtgaattccttcccagcccccactctggctggttctactactgccttagagagcagatttccctttgctctgcagcgcccccatggggctaagagtggagtggcaaagggaacacaggagggacaagctgtgtttcaggttgaggggggcggtggatgaggctgaatggcagttttgacaaagaaaaaagtgaccaaaaatcataaaaataatcttttgagggcccaatagtaaggcagagccatacaattcacattccaaaccatatagatacgtctgagaaatcctaaagtgctaattgctcataaaagaaaaaattacacatataaacacacaaagaaaatcccttccacaaaatcggggtgtcattttgcatccagcgggattcattttaatttctttgaaaatgagaaggaaggggactcaaatgaaaaagcagatagtctgccttctggcagaataaatctgaacttgacaatatcatgtgtctttgggggtaaaacgtacatttcaacaacagtgacaggattaggcctatgtatatttttcaaaaaccgttcacaagacaggcttttctgcagaggctgcagtaatccatctgtcaataagtattaaaatattcagatttcacagggacagacactttaacgcatatttcctaagctccagcccttgtggaaaataatcaacctctttgcacctttctgggttttaaaacctaaaatacagcctttaaaaatgtgtgtgtgttgtggggtaggggggtgcattgccaacaacattttcggtgatagatggaacttcttacgggactgtcaatgaaagagattttccaaatatcccagcaaacagcaatctttcacagctctgatcactcctccattataaacccaaattttgggttgagataggtagattattttagacatatctttattagaaattaacaagtgacgagattttgtggaagctttaagaattcatctgtaatttaataagtcgcttgaaggactctcatagccaaggctcagaacagcctgacctttgaaagctgcttctggtccaaacattttgggctaattcttgaggaatctgaaatattattttcccctcacacccttcttttaagagagagacataaaagaaacaagagtctcccttattcagggatgagtaggaggggaaaaaacccgaaccaacatttaaataaggaaactagcagctctgaacaaacaaactaggacccacaatgaaatgattctgcactgcaattgcctttaaaaagaaagtaatagagaaaaagagaaggaaagaatttctccttcttctctaccccccccccaccccaccccccaactcagcttcaaagctaagaagactgtgctgcgtgtagtgcattgtagttgtggcagtctgttctaaatacaggcagtatctgtgatactggcacggcaggcctttagaattccctccggctgatctcttaaacacagactgaagagatttttttacaacgaccttgaaacgagcctcgaaaacaaaaatctcaagaccttaagagaaaacaaaacacaaacaggtatttggctcacagaattttgtagaaaacacacacataccaccccgccacccccaccctcccccccacacacacgtttcttgcaacaagaaatttcccaagagtcaacaataacagattaaacccaccacttgctgtcctggaaagaaacaaaccaaaccaaaacaaatcctttgaacatttctctgaagtgcaggagagacacacttcagcaaaagtccaagggggaaaaagaaaattgcaccaaaggaaaaaaaaaaaaaaaaagtgggggctgggattgttacatatggccaaaaatttaagcttctttcaatagtattagtattgaaataatacatctttaaaacgcttgagggattagatagggaaagaaaaggcacgtacaaaaaaatccaaccgatgccgatcctgtgatttacgtaacaccacaaacttgcaaaaggcaaaaaatcagaagcaaaaatccataaaccatcaaaatacagaaaccaaaaatcccaagccaccacaccagaaagaaaaaaacccagaacaacagcaaaaacccctgtcctaaataaaaataaagcaaatgaacccaccgaaaactgcttggcaaatatttttctcgtggtgcctaatattctagttggaaagagctgtgatgtttattttattttatttttctcttactcgcctctctaaccctactatatatataacatacttttcccagtggttcaaacctctcgctcccttttgtgcatttagctcgatctgctgagtttatgggtaagaaagaaggaattagccccagaccccgggaaagcaaagcgcactccccctcttatgtcaccgaatagcaaattagttctcagaattccagaggccgagctttgctacagcgaaggcgccgacgtcacagaggaggagcccacgtgatggtggcggagcaggccataccatcgtcttgggcccggggagggagagccaccttcaggcccctcgagcctcgaaccggaacctccaaatccgagacgctctgcttatgaggacctcgaaatatgccggccagtgaaaaaatcttgtggctttgagggcttttggttggccaggggcagtaaaaatctcggagagctgacaccaagtcctcccctgccacgtagcagtggtaaagtccgaagctcaaattccgagaattgagctctgttgattcttagaactggggttcttagaagtggtgatgcaagaagtttctaggaaaggccggacaccaggtgattattgctgttgctgccgccgctgctgctgctactgccgccgccgccgctgttgccgctggtgccgctgccgccgccgctgctcatgatcattattttaccttttaattctttttttttccgctcttgccaaatgctttggctccaagttttctatgtgtatctattgatataaatgtatatatttatttattctagctgtcaggtgttaaaataaatgccgaagattagtcccacgtctctcccaccataggatatagattgttatgtatttattattattattgttgtctttgagtgaatcggccggtttggggaggcttttgccaccctcccttgtgttgttttggtttttggaaaggaggtggaggagaggaaggaggggaattagggggcggccggagcagagaggacgagacagtgcttggggggtgattcgggctagtctgggggctgtctggccccagaccgcggagaggacgcgcgctcgcgctctcgctctttctgctgctgcttgcgtacggcttgtgatctctctggattcgtgcggctgtgttttttccctcttttctcgcttgcaaactgctttccttgctccgtcgctcctggcctccgcttccctccctcctctttttcctcgcctcttcttccttcccttcccctgtccttctgggtaactccgggaggcaaaaagggaggctgcccgctcgctcgccccgctggctctcttccatcggcctcggtcttttagattccctgccttcgagccgaaccgagatttggaaggaaaaaatgcaagcgaactctttgggtttttgtttttgtttttttggtcataaatccagatgagatgaagtatcgtgtctactatttcctttcagagccgtgatcttcctaacgagagccgagtgttttggtgttccctgcccctgtgttttggggagcttgggggcggggatgttgaacactttgaaaattattctttcttggttgtagtcgagggagtcgggaacctccgcgcgctctccctgctcatcccgaggagagagactgatggcgggacagggcttcttggggtgggtgggaaaggggtgcgcactgcacctgcgatgcctttcagtgtgcggggggactcagggaacctcgacaggacagcctgggagaacgagaaaggtggcgggatttctggccgctgcggtgtttgtattttgggcgctgcgtgactctgtgttggctcccaatggctgttgcctccctttcctaaattttattttattttttcccatggtgcaagctctgtaaaaagggaactgcgggcctgagcgtagtggacgccaggcttcagattcccgaggtccttaccttgggcgaggagaaagacgaacagagccccagcccgcgttccttatgtgcaagactcaggaggagagaagggcactttgtggccgtggctgaggggacccggcgcgggaggagcgggcgcgggcgcgaaagggagatctttgtgagtgattttgcaaaaatagattgcgaggttggttggatttgcaacctgtggctctcctcgagggagtaagaatgggggaaggcgcggcggcggcggcccggggagggagtgggtagagttggagcctcagaaatcggctgagctccgggggcgggcggggagaaagggcgggggggcagcaggagctaggggccaccccgctgccggatgtagtgaccgtggtaaatgtcttgagaactgtgggttgcgttgcctttatgatgccgtgttattggaaccctggcgaaaaatggaactagtgttgcaataatgagttttaaagctcccccatggaaaacaaaaacacaaccaaaccgattttttaaaaaaatgaaaaaagaccctctgtgttgtgttcccttctacgatggttgtgttggtggctggggtttgggggtggggggtcctgacagttgagcagataaatgaccccaaaccaggtgctgaaagtcccaagctgtcacagggcccctgaccacctcagagagccaatctccactccgcgccccctccccgccggcccccgccaccccacaacccgccaggatttaatcttttatggatttttttttcagtttatagtttccaggaggaaagtcttgtaacgctttactttttctcttctttttttaaagtaaagtgagtgtcagtagatgtgttttttacagtctggattttaaaaaaagtggggcaggagagagggaaccagggaaagggctgtttagaaatacagtttgtggctctgagcgatgccaccggcttcctctacagagactgccagtttccctttttctttgcaaggtgtgtgtggttttaataaataacttaaaaaaaaaaagagggggcggcaagatccatcaggagacaggtatctattttgctcactatttactaccaagagcctttggcactagaacagaacctcgtaaatctgcagcccaagttgaagttcatctggccctagtccacacgctattcctggaggtagcaaacatgagctcaaagaagagagatgaaatcacattcttgctttaaaatatatacttttttaaaaaagacgaaaagatatttgtctctgggggaggaggaaatggcgaacaagtaccaggagatgggcattcccttactctaatgactgcagttgagtcttcaggccaaaatagaaacctgtagatggcaactctctctccacctccccgccccgcccgccaccccaagcttataaatagaagtttccagtatcctatttggaagactttccaatactagaggccgaagcattggctagttttaagggttgttgatagtgacagtaaggctagatgctgttcataaaaactgggcgacttgaaggagacagccagaaaaagtgggaattctccaattgcccctttcttcttttcagttttgaagggttttataccaatgctttcttgaaaagactaacttattctgggtttggtggatagggatgggactctaaatgcttaagttgtcgtttgctgagcccttgaagagttccagttattggttgagtaaatggtagccatggctagatgtcaaaacccttccttccctctatcccctacagggtaatgacactcacaacccactttgttgtgaaaaacttaagagatatagaggaggcggtgcagcagcgccacccctcggtgggtgaaactattggcaaaagtcaatttttgaaaaatattgggaagtgaacttatgaaacatttttccctcagagatttaaaaaaaataggggagataaaactaacggataaaaaggactttgaagtttatcaagtagggaagaaaaatgttgctttccaactaggatggtgttataataggcaacgtggttctaaggtttttttttttggtggggggagggtgcctggttgattttaagtagaagagttctccaggcggaggtagcccggccttccccttggattgacttctcagggcatcttaattctgctgcctgtctgataccgagatagtgagggatgttttggtgtaaaacaccatagtggctggaaatgctgtagttttgccggcggtggcaggacgtatgtgtagggggtgtgttgaggaggtttgtggatggcgtggagcaatggtaggctggtctgtagccctctgtgagtcaacatcgaatggcgcgtgccggtttccagcactgcgcaacaagtgggaccgccgctgccgccgcgagcacagcgagggtgcagcgtggtggcagaactggctggtttctctttgccccagtggaaaccaggaacggcccctcccaaccctcccgatgtccactccgagacccacaacttcaccaaaagaccatacccgactccccactcccccgctttgccaggcgcagtgagcctgagtgggatccagcactcggcccccagcgcccctttcctccgagaagatcaggagtttattcccgactttctttgctggatgaccagtgtttggcaagaatctctgccaatactgtcgagtgccattctgccttttgaagacaagtgcaccttctttcccttcccagtacataaagcttttcggaggctgggggagaaatcaacttatgatacatgaaaccagctccagataccgcgttgtggttgctagaggcgggagcatcgggaggaacggaattacatacactaaattaaatgttttctagctttgcttttagaggcaatcacacccccaaccctcgcccccaccagacagaaaataaagaggggcgggtagggatcggtgtggaagctgcggccgcgcggcgattctcggacgggctggcctgccacctagcggtgggctgagatcgagttcgcggccatgggcggtgggctcgccgttccacctcccgggcggcggtaccctgaccagatgctaggactgacagaaggagggcaccctccaatggggatggcatacaacctccaaagttttggcaagagggatgaaaatcagaaaggcctcgctgcttgcccatcactcagcgatgagcatctatttgcactaagaaaaaccacaaataacccgcttcgaacacaccatcttcctgtccctgtggcccctcttaggggaagtcggtagtggaaggatgccacctaggagctcaggggctttgggacgtacaactctgttttgcagttgaggaaacaggcccgacgaggaggcttgttagtggtgagttagtgacttaaccaggaccagattttaagcttctgaatttcatgtcagtgactgaaagccaaaggcgggtttatctcagctccttagaagtatttatgagaaaggagcggctgccagaaccatgagtttaacctcttaggtcacctttgttgccagtgttcattggaaaccgctccccagcagtcttggaggattttttttaaagaaaatatggcctaagattttcggtaatgacacgaaaagcccagatggtgctgaagggtgtgggtctcggagctcgggggtttgcgtgttaagaggggggttaaggcctgcaccaaagacttgcagggcgagcctcgattctgaaatcgctctcttccccttcctaacatcctctgcatagtagcctggcgagaaaccgggtgtgtgtgtgtgagggggtgggggtcatgtggataggccagaatttgtgccacaacagttcctccgtaaagttttctttctccgagctcgtgacttaagatggcaaacgcgcgtccgcatgctggcggcccctagcggcagcaggcgcgctctgcagggggagacagcgccgtcgcccccgcccgggtcggcggggatcgagttcggcctctcccactgcgggagccgtcggaggccgcgtcggagaaacgcgcctctgttcggactggaaacgaatctgggaacgagtttgaagcgcggtcaagtttgactcatcgctttccaaggacagttagtgccttccatcttcattaacgtgaataaggaccttggctgacttctttccagatcggatttttaaaggcattgtttgcttgaggagatcatgcttctcccctcccccgccagcctttttgcaaaggctgagcccagtccagccaggacggccgagggatctctgctccgggacgcgatttgctggcattgtcttcgggcccttctggaaggctgtctcgcgctgagcgtatggggaacgtcccttctgcaactcctcttcagatcttgatgataaaacacatccctctgttttattgcatttcctagaagcttgcaggcttgcaagagcactgttggcaggaaacgtgatagaaatgaaagtcaggacacaatgtccccgaacacctcggttatccaaagcggctgtcgaggccatcgcgttatcaaattcgcttttatttactgtcgtctcctgcaccctcccgttccccagccaagagggcgaagagtgttttcccccaagaataaaaacagctccgcgatttgacctcaccccctgccgccggaccacggtggtgtctgcagccgtgcagctagttggctgaaacactgctgagaccgggagccccacggcagggcccctgatgcggggttcactacggcagttgcagccttattaaaattccttgtccttgtccctaaacagtgctttacactttcagatttccctttggatttttcagcgggttattggagttattagattaccaataatccaacagcctctgtagcctctctggctggagaggaggggggaagggcggaaggcattctccaaatcgggaggctctggccaaactaggtcaatgggaaggaggggaggggcgagaaaggggttgacggtttcaaaccttgatggagggctctctctagcgttaggcagcggtaaaaacaccattcggtttgagctcccggaaccacgggactcctaatttccaataaatgcacttacttcattttaacttcccagattctcatccctaccccttattaaatcccaaccgtctctttcacctttatcccaccgggcgaaggggtgagaaagcctcaatgtaggatttggaggccaaaggctcgttctttgcagaccgactctgacccttccgcttgccgcagaagggatgagcggcgcagtgtgacgccactggctagttttaggaccagactgcggcctttgtggctgagtctttcgctgtcccctagcccccgaaagcgcaccccggagcctgctaccgagaccaattaggacatggcacccgggggttataattcccgggagggccacaggaaggcgaggcaactttggagagtgccagtgcgcgcgcaggggtcggggccccggcctttgccgagtccaagctgtgtctctacggtttcggggaaatcggattcggaaatccttacggcttggcagctcctgttctaaagactttgggcggaaaccaagtggagctgggttcccgttcttgccaacgtaggcggaaggggctttctgtttagtttttctccaaccttgcctggggcgcctatgatggagaccctcagcccctagggactccatcttttgaccttgaagtctcgctcaaacattcccctaaaagaacgggggtgagggagaatggaaggcaaaaagagggaaaaaagcaaataaacttcggaatcggacaacttaaagtctcgatatgagcctcggattgtattcgaactcctgggttctagacccagctctgctactaacttgtctgaccttccccatttataaactgttgtgggtgagaggtgggactaggtgaactctgagagccctgcactcggcgcggacgagggatttaggggaaagtgtgctgtattccccgcgagccttccccagcggccccgcctccccgggtgaatccccggcggccagcgcagcgcaggcagcgatcctggcggctgccggggccggcagcttcctggaaagttacttcttgttggagccggcaataggcaaagtgtgttctgtgaaatccgcagagccgagattgactacgttccgggaatgagagggctgtgtcattcccctcattgcctgctgcattgacggcgtaacaggaaaaaaaaaaaaaaaaaaaaaaaggcatacacacaatgttagctaccgaggtgcacgaaaagttttatttgaatgtaactaaattaagggccgccacggtcataccacaaagcctccgtcgcgccttgcggggggcttcgaggtggatcgcccaggggcgggcagtccctggaagacaggtacggagtggtcggggtggggtagcgaagtctgcctaggcttgccccggcgcgcagggctggtgtttgtgctcttatgtgtgagcgagaaaatggggctttctggtgccagcccaggggaggagggaggaaaaggatggggtcttttgtattggcttgctctctggctcttaacctcgcctctccctcttctctcattttctctctctctctctctctctctctctctctctctctctctctctgtcgtttctgctgtcttctctctctctttgcttttttttttttttggttcctgttttcttcttcaatggaaagctcttttaaaggatctgtcttctcaaggagcctagttggctatgcacaaggaaagcgccaaaagagctaaagggaggaagggaagagaaaacatttaactctcccatggtggttactgacccagcgtgggtgcggggagattgggatgggaagtccaggtctgggggcagccagcagttgtcagtttctcattgacagccctgctccttggagattgtttttgtgggtagtcttgtgtgtggcattggtggaatggctgaatctaggagacgcggcgtgtccagaacttgctggaaattggttttgagattttgggcaaggcctctcaccccgagcctcagttccctccctaataaagcagggctgttataaggataagatgcaatcgtgagggggtgggaaaggactaagagctctgtaaaaatacaaaccaaatgctggtggtgcttccacacctgcggcatttggggtgggggtggtgacaacattgcccacactcaacccacacactcaggagttggggggggctggttcttaagacgagttggcttgcaaaggagtgaacttgagaaggacctgcgcctcgtgtatgtacatttgtttttggccaggcagaggcttacggtgaaaagcccaaggcccagctgacagtggacacaggggaatttgtttgtttgtttcaatccgcatctggagtgagtcattgccacttgtcatggtgaaatggcaaatctgggcttcctgtggttccagaagcctgcgactggaaatccacaagcgagctggtggttgaagctggttaaagaacagcctaggtattccagaagtgtttgaggatcccttccatgaaggaagagaggaaagtttttaagtaaacctcccactcccatgtgtcttcagctttcttttgcaaaggagaaaatccttgaagtttggtaaagaccgagttagtctatctctctttgcctatctcgagttgggctggggagaggaggagataggttcttttgtctttttctgtcttctcccttccccacttccttccctccagtccccactcactcacatgcacacactaaccttggagccgatgggattgagtgactggcacttgggaccacagagaaatgtcagagtgtttggttacagactcaaggaaacctctcattttagagtgctcatttggtaagactcagcagcctggaatggggcaaagtgtttgtgtgggggaaggaacttaaaaatgagattcacccacatcagggtgctgtcttgcatgttctacagcacgtaggctgatttggaaaggggacaggaatttgagccagaagacctagggccgggtcaccaaccatgtacatggcccaacatgaccttgttggcctcaggcctctttacccagaaaatagctctaaaaggttctgcttttttttttttaaaggggggaagacagttcaaatattgttttattttgcagcccacatttgatcataaatgagggtcttacacctgtgcttttaatgattttgttttagagaagccggtttggaaggaggtacatatttcattaaatctcttcaaggtttagtgctccctggccagttctcagctaaatcacatagttaagtcttttaccagcagggagaagcacaaacttagaagcaatggcattctgtctggtcttagacccagtagggaagggagagaacactttgaaaaagaagacaaaggttttcaaggaatacgtagacatgacatctcaggctgtgttctgcagagtctatattcagtcttaatgtttcagatgggcaggaaatactgcctagctgtttgtcttgagcaagccacttgaacccctaagtctcagtttcatcgccagtgaaataaggataaagatattggccctatcgtccttgcggaatcattctaaggcttgaaagataatattttagcaggttttgaatgacgtccagtggttttaggccacggacgaatcgttattgttaatgttgacagaaccatttttcttattttttctttcccataaactctagtggcctttggatagtataaattttttctttgaagaaggaaatatatgtatgtatgtatgtataactaattaatgtatgcaattgtactcccagtactctggataaaaacattattatctcatagcttcgggtgcctgttgtttccgtaagagcagagctggaaaatgtttgttagcttgtggtaaaaccacaccagctggcaagctgcaactatcaaagcaaaactaaatgtgtatgtcctaaaataagactatagtggacaatcttacattcgttaaatcaatttctgtttgctttcttctcttctctgtaggttttgagcaaaattttggactgtgaagcaaggcattgggtaagtaaataaaattatatgctttaaaatgttgggacaaactgtttcttttgaatttgccaatacatgtgtctctgtgaactttgccactgttcattatatgagacaaggataaccagttccctctacatcactcctagtcctcatccttcacctctgtattagactgtcttaccacttgcatggtcaatcattgttactctttctttgtacaaactaatttagccagctaatgttcaccaacaatatgctagctcctcgaggtacaaaagtcaagcaactctaaagcctaacagtagagagagaccaatggtgactgagatgatgaaataagatacctatgagaatagctatgagttttgagagcctcctatgaacgaggaatgtatttctaacttttataaccacataggtattactacttccatttggggaaaccaaagccccaaaccagtaaacaacctgcttaaagtcccacagctagcaaaaggcaagtctagcctgataatcttaaaacacagtgtcttgactgggcgcggtggctcatgcctgtaatcccagcactttgggaggccaagttgggcagatcacgaggtcaggagtttgagacccagcctggccaacatagtgaaacactatctctactaaaaatacaaaaaaattagctgggcatggtggcaggcacctgtaatcccagctactcgggagaccgaggcaggagaatcacttgaacctgggaaggcggagcttgcagtgagctgagattgcactattgcacttcagcctgggtgacagtgtgagactccatctcaaaaaacaaaaacaaaaacaaaaaacacggtgtctctccattgcaacatactcactacctgtcagtgcttggcagagtatttggtatgtgggaaaaacactcaacaaatattcattccctttgcttttcccctaaagagctttctgtcccaacttgttggataaaagttattctccccattttaaaactatgaagaataatggccagagttggactatgaattgttcaaagatcaaacacaagggacctgagttgcattctgtaccttagcaggctaagccacctgctctgatacctgtggcaagcaggaaacaggttctggaggactaacaggattttggcctcttttttcaagtgaagacaaaatggcctcgccggctgacagctgtatccagttcacccgccatgccagtgatgttcttctcaaccttaatcgtctccggagtcgagacatcttgactgatgttgtcattgttgtgagccgtgagcagtttagagcccataaaacggtcctcatggcctgcaggtgagggatctgaaaggaaagggtgggtaagtcaaagtggggtgatggtgctggcagccaagcaaggcagaacatgtgggccttttactgcatctgggatgacgtctcgctttgtctccagatctcagcaccatggcgtggcacagtaggctcccaagtgaatgaatgaatgaatggatgaatgcacttttagaaaagaaagagccatgttctgtgggcatagagggagaaaaattatatactgccccaagaaaggatgtgtttggggcagacatggagaataacttcagttaaccagtgaaaaaatgagaaaagatttcaaatgaactttctttgtctttaagtagcttaagcaagttaatttgaaatgttttgctcttttatgctataaatgtatttattttttgctacaactgaatttccatgggtgttcagagtatatgcaagagttagtgagagtgaactagctgattcttcatgtttatcaagtatttcgagttttcagagcaattttatattacatgatatcatcttcctggatctttttagtagtcttcagtgttatgcattacactattgccttcattttatagatggtaaaaggaaagcacagggaggttaaatgatacagaatcagggatctctattgctatttgaaaacttatccaacatctactctaagcacctgatttttaatagtggaaataacagaggcttatggagatataaaaataatagataatgtttagtgaatgcttactatatgccaggcatcattctatatcctttacatttttattcttgccacaacactataaggtagacatgattgttcctcctactttgaagatgagtaaagcaagatgcagagaagctaaatatcttacccaaagttgcatagctacttggtggaagtctggctcacttctggcaacccactcagaaaaagtagaatcaagaatcaagatgatagctcagaattcttctttacaattgagtactctttccaccaccagacagcatggcacctggaggcattgcttggggtttgagttgggtcttcaaggaataacagaccctctgttaatctatggactttgataaaagcagtagagtatagatgtaggcatatttttatttatttgtcattcatagccaaattctaaaaagagatagaattttaaaaataagtgtaaatgcaatggaacaagaaggaatgcttatgacaaaggtagactaagaatagttactgcaaaggggctaaatttaactctggtaatctgtacagttaagactaaaaggaaaacaggccctgtgactttaagaatattcacttaacccccctgatcttagttcccctatttgtaaaggcagagagtgatagtacctaccttgcagggttgtaaggagcaaacgataatgtatgtaaggtgcttaatgactcctgacatttggtaagctctccataaatagcagctattattaattaccgtagaagttctggaggtaggcccaggggaaaggggctgagtatcagtgctgactgtaagggatcacagattcgatatgtctactatagtgggacatttgtttgttttacagtggcctgttctatagcatctttacagaccagttgaaatgcaaccttagtgtgatcaatctagatcctgagatcaaccctgagggattctgcatcctcctggacttcatgtacacatctcggctcaatttgcgggagggcaacatcatggctgtgatggccacggctatgtacctgcagatggagcatgttgtggacacttgccggaagtttattaaggccaggtgagttgctacccgggtggaagcgtcggagatggaagagatagtccccgatcagaaacctttgataattcatgcatacagaaaaaatactcctctatgatatgctgcaacccacatttccactcttgttgcacacttctgctcttcttaactcttgtgccccaggcagacttaactcctgtggctatacaggtatgtcctatgcattaccgcatcttgctttcttccattcacttaatataccctctcctcccacccatcctgcaaggctaatcttggatgccagctcttccatggaagtgtttctgattaacacttttcctccctcagctcttcctctgtgttgtgaagcattttgctggtgctttaaactttccttctattttaatatttgcatatgtattttagttctcctttagacttctattataactatttacatatgtgccttagttcccgaccagactgtgagctactcaaggttataggggctatcttactcaccttttatgtcacgctgctcctactaggcaggacatttattgaattgaatggagttcactgagtttaatctcctacctgaggggtgataagacatgaccttcatttaaagatgaggaacttgagatccaaagaagtgaagagcttcactaagtgcaacagagactcagagcttaacttctttagaaccttttgatccagccatgctagggtgattgcatcctcgctcaaacagaagggttttccaggctgtgtttgaaaacctccaggagccaggaactcagtgttcccagaaccacacagcataccttggacagttagaaagcttctctttttggcttctctttaaccttcttatgggttctagctccgttaactgtgatcatggtgagcttgcctatttatttcacccacatgatgttccttcaggtatatacagctagagttctttgtctcctgtgagtgatgacggtggcaagatcatcattgctgtcatttacaagtactttcagtggctcaggccttgtgcttagaatggctgagtaactggctccatgtcaccagctgctaagtggcacagctaggtttgcaaaccaggtctggctgctctagaccagggattcatacattggcatttgctgcctgttctttatgtaaactttcatcagcatctgggacaagttctttcttcagtaggctactcgtttgtgtatgatcctccaaaagtgtcataccaacattgtataaattcttttcctgtttccctatgtgtaaaatggagataataataaccacctttccttcctttcaggattttgcatgggtgaagtgagataagggctttgaaagttttatgtgagctataaaatttcataacatcagaagagctatagattcacacacatgcatagatatgtgccttaaacatacaagattatgtctaatcaggcatagatcatgccggaaactcacttcccttctctgggcctcagtcttcccaatttcaggctggatttccaggcttctagcataaatgcgttgtaattgtggttccctgctccagagccacatcacctatgtctagctaattcaaacacagatgtggttatataagtgtcactggaaggtcatctatttaacagttctgatttggggccggtgtctttcctctttttttctttcacagtgaagcagagatggtttctgccatcaagcctcctcgtgaagagttcctcaacagccggatgctgatgccccaagacatcatggcctatcggggtcgtgaggtggtggagaacaacctgccactgaggagcgcccctgggtgtgagagcagagcctttgcccccagcctgtacagtggcctgtccacaccgccagcctcttattccatgtacagccacctccctgtcagcagcctcctcttctccgatgaggagtttcgggatgtccggatgcctgtggccaaccccttccccaaggagcgggcactcccatgtgatagtgccaggccagtccctggtgagtacagccggccgactttggaggtgtcccccaatgtgtgccacagcaatatctattcacccaaggaaacaatcccagaagaggcacgaagtgatatgcactacagtgtggctgagggcctcaaacctgctgccccctcagcccgaaatgccccctacttcccttgtgacaaggccagcaaagaagaagagagaccctcctcggaagatgagattgccctgcatttcgagccccccaatgcacccctgaaccggaagggtctggttagtccacagagcccccagaaatctgactgccagcccaactcgcccacagagtcctgcagcagtaagaatgcctgcatcctccaggcttctggctcccctccagccaagagccccactgaccccaaagcctgcaactggaagaaatacaagttcatcgtgctcaacagcctcaatcagaatgccaaaccagaggggcctgagcaggctgagctgggccgcctttccccacgagcctacacggccccacctgcctgccagccacccatggagcctgagaaccttgacctccagtccccaaccaagctgagtgccagcggggaggactccaccatcccacaagccagccggctcaataacatcgttaacaggtgatttcagagactgtctgggtctgaggtcaggggttacctgggcagggttccatgtcgtttcttcttttcttgcctgaattgctgagcctattagaggtgtggaatcagtgcctatagattgagttagtctgagtaaggaagtattttacacttaagtagtgtatattttttcatagcaagagagataattcccttctggggcagaatagcattctgtaaatcccacaggcacttcctgtggtcttgatgtagcaggggaccatcctactacccttggactgagagagattgtgggctgcggggaagctctggctcagtttgaccctggtcagtgatctttccgcagatactgtttggagataaacttgaggacaactctggggtctcagagcttgagtgggcagcccagctctggcctctgggcttgcctacacacagggaggagagggtggtcttgaggccctgccccaggtgctgaggctgtttttactcctgtccataggtccatgacgggctctccccgcagcagcagcgagagccactcaccactctacatgcaccccccgaagtgcacgtcctgcggctctcagtccccacagcatgcagagatgtgcctccacaccgctggccccacgttccctgaggagatgggagagacccagtctgagtactcagattctagctgtggtgagtccttttccctccctcctcttgtcagggagaaggaaggcccctctgctccataggttttgtgctccattttacttatgctgttgtctctgattggagcagtcctcaattggaagtccactggcactccaagtcaccagccgttcatcccacgcttcgcttcttggggaactgggttaaccaaagcaagggatggggttttagagttgatctggggtaatcaagacttaccatacagtcattttagcttcacgccagcaaaagtagcttgtggggctggctgtaactcccagagctttctccattcctctataccaaaatgactaggactgacctgtgtgcatgttattctctgccaggctgtacattctgtaaggagaagcatctgaccttattcattctcacatcccccataggtagtagtaagtccctagcatggggtaggaactcagtaatattagtcgagttaaaagagttgaagagaattattaaattgcagtttctggatagttggtggttggcattcccagtttttaccagacaaaaaagtctaaatcttcgcccagctctggctacagtaatagagcccagtagtacctaatcagggtaaaatcaccgtgacttctcattttcaaattgttacaacaaatgaaaaaataaatcagctgcttacaccaagagatttggcacagggtcatggacccatagatgggagagcggggactgtcccctcctgcaccctggctagtttgcctttgctctgcactccagttctttttctctgggcctctgttcccacttccaccatcagcttcagtctcccagtctcacaggaggatttggagacatgaaatccaaataggtgcaagggtgaccacagagtgttcgtcattgattcctccttcagtgacctcaaagtagaattgaatttgacctatatcttacattcctggaatgctttgtgttttattttgtgtaatataatatcctcctgtgaggtaggcaggacagggatttattatctgactttgaagacagagatacagagagaggctcagaggtaaagggtcttgccctagggcttctgtgtataaatgtaaataaaactgtaaacttatttttaaaaatcaattctcagagctcttggggaaagaaaatctctgttgagctttcctcaaactggcgcaggccctctgagcacctgttggtttgagcttcccttctgtaccttaattcagtccatctcctttctcccttctctatggctaagactctgaatgataagaaaaataaagtccccacagatcctttgctccgagctcccatgaatgtcgggtgggtgagtgagggactgagagttcagtttggcacaaggggtagctacagaggagagcggccttagagccctacctcccttcctcgtgctgactttggtgtccccctaccaccctccaacagagaacggggccttcttctgcaatgagtgtgactgccgcttctctgaggaggcctcactcaagaggcacacgctgcagacccacagtgacaaaccctacaagtgtgaccgctgccaggcctccttccgctacaagggcaacctcgccagccacaagaccgtccataccggtatggccctgccccacacgacccgaactctccacaattattggggcaggacagggagaggatcctagagaaagctgtgtggggcctggagacctggtggggcaaggcaggaggcaggccccatcctggcctgaacgaggggtctaaccctgtcttgtctttgcttagtgactcgactcatctactccctgtatcctttgtctttcctctgagatgctctatcctgcttttctgcctttgctggggtcagaagtgttaatcccactgtacaggtgaagagactaagtctgggaaagacaaatagattcgatttttgtaaagccagaaaaaaaagcctgttgatttgtttcaatgacttgttccttatcaactcacattcctttaccaggtagcttctcatgacctgcttgttgtttaaaatctactctcttagtaccgtaaatggccctattatcccaaaaactttccatgaaggaaggttcagccattctattggtttcctctgctgagcatctactcaggcccaagccccacccctcttgcaaatggaatccagctgtagttgccacaagcggaaaaatctgtttgttctaaaagagagaaactagagcagcctgattgtgtctccctggtgaatgagttgatgagtgaatctgtcttatccaagggaaaagctagaagaaccttcccaggtaatctgaagtagcccctcaggttccagagagggaaactgaggcccagagaaggagagtgacttgtccaggttccgcaggcagataatcctaatgacaaagctggttctaaagcccaggcttcctggaatctccccctctcctatcccacacctggcattgttgctactccgtgccaccacttgtttcttggccctggtcccctgcgaggtatgcaggtgcgtgtgtgagagagggctgacagatgtgggggcaggcccctggattctctctctcacattccctaagggaaaggaaaacacaagtggcctcagggaggagcaggctgcttagaaatccaggagccacggactgcagagaccttccttattgaatatggcttttctttttccctttttcttggtaataggtgagaaaccctatcgttgcaacatctgtggggcccagttcaaccggccagccaacctgaaaacccacactcgaattcactctggagagaagccctacaaatgcgaaacctgcggagccagatttgtacaggtgagcagagtgggcaggcgagcggagcgggcaggcgagcggagcgggcaggcgagcggaggagtgggcaggcaagcggaggagtgggcaggcaagtggagcgggcaggcaagcggagcgggcaggtgagcagagcgggcaggagaaagtcccactcagtccccgtgtgcaggtgagcagagcgggcaggtgagcagagcgggcaggtgagcagagcgggtaggtgagcagagtgggcaggtgagcagaggagtgggcaggtgagcagagtgggcagcagaaaggcccactcagtccctgtgtgcaggtgagcagagtggcctggagaaaggcccactcactggctgtgtgctaatgaggggctgcccagaggcctgcagcccaccccagaagacctctcatgccttcttcttcgttcaggtggcccacctccgtgcccatgtgcttatccacactggtgagaagccctatccctgtgaaatctgtggcacccgtttccggcaccttcagactctgaagagccacctgcgaatccacacaggagagaaaccttaccatgtacgtaagcctcttgaggccgctctctgacctgcggggatgtggagggcagggaaggaggtggagcgcagggaaggaggtggagcagggaggcagtggaactgtttgctcccatctcaagcacacagtggggcaaccactacgctaatggttggaagacctagatctgggcccaatggccagacaccctgcttgaccttgtcccaagcattaggggactcatctttaaaatgagggtatgggactaggtgatctgggccttaggagaggagtctagactgtggatacatagacttgattcactccacctagattcattcatttcacaaatacttattgattgcctcctggacaccccatactgggctagatgcacatttaagaggagctaaggtgtttgagaaggaacagtcttaggaggaggagaacaaaaagaatgttataagaattaatgatgttacaggaaaaaattaaaaaaaaacataaagaaggtcattttaagaaagaggaggcggccagccatgcagcacgacactgtggataggttcactgggattggagtgttctagggcggggtctcggcagctatagcctgtgtgccaatgtttgaacattccatgaactaggaatggtttttacagttaaaaagtaaaagaatattttgtgccatatgcaaattatatgaaatttaaatttcattgtccctaagtaaaaggttattggaacacagccacgctcatctgtgtacgttttgcctatggttgctttgaggagttgatgacattcttctaggtggtgatggggacaagaagtaatcaatgaatggttaacctacataccggaggttaacctgcaaaacatggttatttttgttcacttgttgatcaagctgtgagtgaatatcttcttacttgctgtttgggcaaattcgttatcctcttagtaccttaatttcctaatctgtaaagtgagtttgaaaatagtatctacttcatggagttgtagtattaactaatgattaaagtgttgaggatagcacatgcacatagtaatagtaaaataaatatctgctatcatgatttgctagaattttagatgcctaggatatcagagttgagaatgactttcagcctgtattgacccaggccattcagaagggagatccaaggcccggagagtgaaatgacatgctggggacacacagcggtgaatggcatagatacagtagattctctatgtctcccaagaccagagagtttacacatggccctgctcattttttatttgtcttcatctatttccattttcacttgaaaacatatactctatctgaacatattttattaccctttttgttttaggatagttttagatttatagaaaagttgcaaagattgtactgagggctcctacccgcacccattttatcctattgttaacatcttacgttagttccatacatttgtcacaactaatgaaccaatactgataatataattataagctaaagttcgtactttacttacattttctttgtttttatctaagaatgtcctttctcattcaagatctcatctagattaccccattacatttagtcatccattttacttttaagtaacttttatctaaactaaagcgcttattacccattcattgaattaaatcaagaaacggctccacttgctaatgtttagttagcttatctaggatatataccctaggaaagaatataactgcatttaaaaaaatttaccctagactccagaatttccgtgaattcagactgatctagtccatttgtccagatgtgttcagattaattgcataatttgaataagaggtatattctgtgaggtcctaggaagattataaagtttaggaaaaaaatagccactgccctcaaagtgttacccactgaagaaggatccatgcacacggagggctgtgtggtaaaggtagaaatcttacagaggctcaaaggaaaacaaggattattttcatccttgagagattcagaaatgccttaatcattagaagagtttgcatctaactgcacttttggataagactcaaacttgtggagttaaggcagggaaggacgtctctagcaagggagaggcagaagcaacacttgggaaagcagggaacggacatttgcacaacgctagcttatctgtcggcagaagcccggatgcatatgggttcttcacctggccttgtagaggcaagagctgccccagtccctcgtagggagaatcttcctctctgggtctttgagcaatgacatctttcttgggttgatgacagctaacagtttgcctctgatatccctgcagtgtgagaagtgtaacctgcatttccgtcacaaaagccagctgcgacttcacttgcgccagaagcatggcgccatcaccaacaccaaggtgcaataccgcgtgtcagccactgacctgcctccggagctccccaaagcctgctgaagcatggagtgttgatgctttcgtctccagccccttctcagaatctacccaaaggatactgtaacactttacaatgttcatcccatgatgtagtgcctctttcatccactagtgcaaatcatagctgggggttgggggtggtgggggtcggggcctgggggactgggagccgcagcagctccccctcccccactgccataaaacattaagaaaatcatattgcttcttctcctatgtgtaaggtgaaccatgtcagcaaaaagcaaaatcattttatatgtcaaagcaggggagtatgcaaaagttctgacttgactttagtctgcaaaatgaggaatgtatatgttttgtgggaacagatgtttcttttgtatgtaaatgtgcattcttttaaaagacaagacttcagtatgttgtcaaagagagggctttaatttttttaaccaaaggtgaaggaatatatggcagagttgtaaatatataaatatatatatatatataaaataaatatatataaacctaaaaaagatatattaaaaatataaaactgcgttaaaggctcgattttgtatctgcaggcagacacggatctgagaatctttattgagaaagagcacttaagagaatattttaagtattgcatctgtataagtaagaaaatattttgtctaaaatgcctcagtgtatttgtatttttttgcaagtgaaggtttacaatttacaaagtgtgtattaaaaaaaacaaaaagaacaaaaaaatctgcagaaggaaaaatgtgtaattttgttctagttttcagtttgtatatacccgtacaacgtgtcctcacggtgccttttttcacggaagttttcaatgatgggcgagcgtgcaccatccctttttgaagtgtaggcagacacagggacttgaagttgttactaactaaactctctttgggaatgtttgtctcatcccattctgcgtcatgcttgtgttataactactccggagacagggtttggctgtgtctaaactgcattaccgcgttgtaaaatatagctgtacaaatataagaataaaatgttgaaaagtcaaactggcttggtctggagggcttttcttgcgttggaatggggcctggcctgcgtctgactccctcagctcctaacctagtggaaaaagctcttggagggaaggggctgctggctgctgcattctcaaaaacgagcgtcttttgagatgaggctaggttcctggtaccttggcatgaacgcacatttggatcccagcaccaggagggactgcggactccaggccctttctgaagagctcaggtgggagattttggaaggacctcccactcagctctaggctaagcacttttgttttgttttgttttgttttgttgttttttgagacagagactcggatctcagctcactgcaacctccgcctcctgggttccagtgattctcctgcctcagcctcccaagtagctggcattacaggtgcacgccaccatgcccagctaattttttgtacttttaatagagaaggggttttgccatgtgggccaggctggtctcgaactcctgacctcaggtgatctgcctgcctcagcctctcaaagtgtttggattacaggtgtgagccactatgcccggcctaggctaagcatttaatgacttccctcctagctctgctgacacatagataggcatctcttcttcctctgaacctcaatttgcccagttttggaagtgagaaggcccatcttgctttctggcttcacgaacaatttctctctcctcggctcatggggcagtatgaaggcatgtggccccagacatatatttctcagcctgagtgcatctggggctttttggtgtctgctgggtgattggcagacatctgcagactcagaagctttatgaatggttagtggccaagcaaacctccatccctgcagaggtgctctgtcccaagagccctgcggcagaactcagccacctcctccagtgtgacttgggacaagcactttccctctgggtcccctttccaacctgtccatgagagtgaactacaccatttatgattccctgattcagatgtaagttcaccctagcttgctttgcacctagttttattttacctcaaaaaacgccaaggatcaagtttgacctgagaacagtgaggacaagtgtggttctggtcactggcccagaggagaagcctgcacaccccccttcctgttcctgggtggcagtggggagagcatgtggagttgagcctgtccccagggccatgggcccacttgttgggcagccgtgtcccttggcagtgcctttgcagcaggctccgagcacgtgctgggaagccatgggagctgaccacccagcaccccacagagagcctcagaaaggcacagcaccctctgccagctgcatggcctttcagctcaggtttcctttgaaaatgactttaaaggacttgccagctcgaggcctcaactcaccctgctctttgaaaagggagaaaatgatccctctgctcccatagaaacttggcaggagaacttacaaaacagacagcttcaggaatgacaattcacaggcctaagggaagctggccccagggtccctttgctcccagagtacctccaagtttgtttgcatttcattactgtttaatagagagatggaggggcgagggcagatagtgtgggtggccatttaaacaaaagggaagatcaaagagtgagtaactgcagccaattgacaatcaataataactaaaaagaaaagtctctaagcagataagccagggcaaagggaatataaaatgtttactaaaaagcaagatgtaaatgcagcttttcacccatacatggaacatgcgtggtgttctacattgtgggatttttagaggataggtttctgaggatcagtgtgatgaggatgtgtaaggggtaatcccagagaagcggggtggttagaattatgcagagctatttagtagttggaagggaaggggtggttagaattatgcagagctatttagtagttggaagggatggggtggtaagatcacctagctcaaatcttgcacctgacccatgaaaggattgaggcaggagggctgaaggcactttcctactgccgcccagagcctggggtggagagtggagaacaggctcctgctctttacacaaccctaagggaaggaaaaccagaggcaaatgttccattttaatttttaatatttatttatttatttatttattattttatttttcttagagatggagtcttgctctgtcactcaggctggggtgcggcaatggcaccatcatagctcacttgaactcctgagctcaagcaatcctcttgcctcagcctccagagtagctgggactacaggggccaccaccatgcctggttacaaatgttccgttttagacatggggaaatggaaggaggaactagtccaaggtcccgcagctaaaggtgtccgggtaggctgagttcgcacagtggttgtcattagaactttaatcagttcaattcaattgttaggcctcaggcttcttggagaaatgagctattccctttgaaatctgggtttccattttctctctctgtctcactcatagtaataattaataataaggctggtcacggtggctcacccctgtaatcccagcactttgggaggccgaggcagatggatgacttgaggtcaggagttcgagaccagcctggccaacatggcgaaaccccgtctctactaaaaatacaaaaattagtcaggcgtggtagcgcatgcctgtaatcccagctactagggaggctgaggcaggagaattgcttgaacccagggggtggaggttacaatgagccaagatcgtgccactgcactctagcctgggcaacagagtgagactctgtttcaaaaaaaaaattaataataataataagttgtcctgtgttctatcagagacatgcattggtaagcactaagagaattagaatgaggaataggagcagagaaaagctgacccctgaagagtagctgggccacattaacggcaaagctccagaatgaggtctgcagaactagggtgacctttcaggatctagttctatgaagcttataattgtgtgggggtttctagtcttagatttctaggataatccatccctcttataaccactgtataatggggtcactgccttcatttctacaccactgccgttacttggactggcctgtatgagtctatttcctggaaccaaaggagcataatttacacacagatagccatgcttctggggagtctgccattagaaggacccttacgcttcacagatagccatgcttctggggagtctgccattagaaggaccttacgcttcacagatagccatgcttctggggagtctgccattagaaggacccttacgcttcacagatagccatgcttctggggagtttgccattagaaggacccttacacttctttgactaggcccaagcttctctatagtggaggccaaggcatgctgtaatccctccaaggtaagaaacaaaatgttatttacccaaaatactgtacccagttggaaagtgaatgttcctcccatcccagagcagagataggaagcttcaaaacagtacacagaagcccagccctaccatgggaaggctgcccattacatgaaatatagcatccagggcctgcctccaaagaagagaaagcttcagcactcactaagaaagtggccttctctcattccctatgactcatgggagaaaaaaagaaaaaagattaacacaaaaaagtggccttctagaaagacagatgcccaggcaggaggactttggagtctaggaaggagacctagtggggtttacagcccctgggtactacattgctcccaaacgtttggggtctagccccttattaaatgaggctgactcatttaaccccagatgacagctgctcaacatatctaaaagatgagtttcctgggtctttctttccctttaggaccccaagaaggcaggttggttatgtaaatacatatggagttgggatcacagaatattgtaactggagagagcttagtgataataattcttccataggcaaggaaaccaggcctgaaaagaaaggtgacatgcttaaggtcacaccaagaattcttatcaaacatcacctgactcccagtgaggtttgtaacgtggttccagccctcaaaggttcgtagtcaaaatcacaaaacaaaacatggacatatatggaaggaaaattacaaggaaacaccaaaatatataaaactatggctaataaattatgttcctcaatgaaaacatataggcacagggagggaaacatcacacactggggcctgtcgggagctgggggctaggggagggatagcattaggagaaatacctaatgtagatgataggttggtgggtgcagcaaaccaccatggcacatgtatacccatataacaaagctgctcattctgcatatgtatcccagaacttaaagtatactaaaaaactgatgttcctatggattctgcatatcttgagaaggggcatgttcagaatggcaaattgtccattcacggcagtacaaggtggacagccatgttgagctggtggcccatggagaggctctctcagggttctcgtgtgtctcccatttgttctgtggaacttcagtgcctccttccatctggacagagctgtcctttgatgtcaccagtaggagtcacctctagcggtgtaattagtttgccaaggctgctgaaacaaagtaccaccagctgaaatggcttaaaccatagaatgttattgcctcatggttctgaaggctggaagtccgagatcaaggtgttggcactgttggtttcttttgagggctgtaaggaagaatctgttccagccttctctcctaccttctggtcatttcctggcaatctggcactctttggctggtagaagcatcacctcaatcttttcatcttcacatggtgtttctgtgtttgtgtctctgtatccaaagttcttccctttttatgaggtcatcacttgtgttagattaaggcccactctaatgatctcaacttaactaattatatctgcaacgaccctatttccaaataaggtcacattctaaggtactagaagttaggacttcaacgtatgaattttgtggggacatgatacaattcaacagaggctgttcatgggaagaaagatgaagaaaaatgctctcagaaaaggcaccaccctagcttctcgttttcactttcttctcgctgtcaaagactcagggaattgagatttggagagccttctcattgccagtaggctttacactcacggtctcaattaccctcacgacaactcactgaagtgggtttgtcttccctctttacagatgaggtgaatggggaacaagaaggtcatggcactcagctaagatcaggcaatacgtctcttttttcttctctagctagttttgtcttttatgtcactggtgggtctctgtccaaaagagcacgacaggacaaaataattgtgctctgtgaacgacacactttgatcatgcagatgggagaaagctgtagatctaggtaggtctttaagaaataggaatcaccaagaacttacataccaggccatcatgggcttgacaaaaacctcaacaagaactggagactattatagttaatcatgtcttgaattatcatggagtatttgagcttaccccactgatggtctcatccagcagttctgtaccataggaagatttcagacattctgcttcttgctctccagatgattctgacttagaaccagtggtgagaattctgatcgaatccaactctatcataaaggaaaggaagccaagtgacattaagcaaagaaattctataaggactaggacacagctcccccaaggcctatgccagtattagttcctcggaaataatactaccatgatttcctatttccagaaacctcagtgctgccactaaatggttaccttcttcatatacattcatgtatctgattacttctttgacagaaccctggcggggggaaccttatatcaatgaacaggaattataaagaggaagaactcagcttgatagaataaaggatttcctgtgtctaaagatggaacgggctttgggtgagcatctgaactcatcactgaaggtgatttaagcttaagatgtgtggtgagttggcagcaatcttggcttgcagggagggttggattaaatgactctaaggtccctttcaaacttgagattacacaagatcctaccccatttagaaactgattttaatcatggcgagggattcagagtaagtgtttcctcctaggagtctcaggacagcagggccatggaagtctgggggccatttgcggagggttgtaacctgtaacctgtaacctgtaacctgaattgccctgcactccagggaccaagttgtgtctttctttgttttttgtttgtttgtgttttttttttcctaacgtacagaggcttacagtttcatacatatcattttctaatagtgaggctataatctatctcccatcatttctacctggtgcaccctattcttcagtcacatggagaagctcaccatttcccaaacctgtgaggcttcagtgtctttgcaaacaccaagacccctgcctagcaagtctcttttctccatttaccctcccttcagtccctctcttcttccagcctgtgaatttcttcagcctgaacaactgtgagcgtctgtacaggtttgttgagtgacggagcaaaggagtgagtgcatgattaagggttcctactggtccctgctttctctgaggctgttctactggtgcattctagcaaatagccacaaggtggcagggtagaccaagcagtgaaggctgtaggtgccactttttctggctccagggaagcaggaaggtataaatggggccagtgctattttttgagttggtctcctatggctttgtacctattctctttctaaatcctcttcgtcatctcagcagagccatttaacagaactgactgaggggctctggcccccaaatctttctttcggagatctacttgaatgtgtgtaaagttccactctgaatttccagctcttctcgaaaaggtaaggggttatatctcaattcttgggcaaaagaggccaattcctagtagaactgtggagagaggcaggggtttatgatatgacactaatctagtgtctagtataacaaactttacaaatcacaaaagcctttcatctccaagggttcacttaatcctcaccacaatctcgccagttaaggaagcaagatatcccatttggcaagtgacaaaactgaggttcggagaggagagcctaagaacacctggctagcgggtgagggccgagaacagaccatttgccttctgacttgctgtcagacactcagctagcacaggcagtaactttgtgtgtcagtggttgaattaacaaaaaggtacacctatctttgtgaggcaggagaatagggtctggagacagagaacctaaggccaatttgcactggtttcctagaactgaataaaaaggaaaaccccatctctccacacccaagtaacaaaaggatccgaggctactccctttgcaacttgctccccccacccctcctgcttttctgccttgcaaattaaaaatgaaagtacctctgattggtcccctcctgcaaccaatcagactgattgtaggcctagtcttcacttgcatagggtgtaactttgtaacttcatgttagcctctgattggtcaccttccatgtccaatcagattggttgtgagccactacttcatttacatagggtgtgaaccaagtaatcaatgggaagcctctagagggtatctaaagcccagaagattctgtaaccagcgttcttggggtgcttgctcaagcccactgccagtctgtggagtatactttcgtttcaataaatctatgctctctttgctttattctttcatagctttgtttgtgcattttgtccaattctttgttcaaaatgccaagaacctggacaccttccactggtaacatttgtgtacccttgagcacagctttttcaactcacaacagtgtaaggagaaaatttaggcttttagggttggtattctcttagggtcaaaattgtaaattctgggagtagacagagaggaagccactgggacatgccatggcgcccaccacctgcatcacagtgtaggcccgtgtccctggacggctggtgcctaggctgtgggctgggtacatctcaatctcctccctgctccccttcagtgctgagggcctgaggaggtgccccttaagcactggtctcctgattacactcaatgactctgggtggttttgggtgggagacagcatcaaatccctgctgtcctgggccctgccacagtgagacccagagcaaacagctttcgccttgattgaagaccaggctctgctgttgaccagctactggccttggtcaggaaacttaccgtccctcagccccagcttctgattgcaaatgcaaagactgtataggataatcttcaggaccccttttggaaacagtgacaaggacttttctggtcaaagtaactgagtgatggaggtaggagattgctctcactaggggtgttctgggaatataaaccattcgttgaggccgcagagttctaattcctcgggtccagccctttctcatctattgttcccaagttttcctgcatccaggagacgaacatgcatggactcaggacttagagttttcttattcatgcctcctgatattttcacaattcaaaaggggctaacaaaaagacactagttatcagaaattctaagccatttttcagctcacaaggggctcaaagttcctctacatgtaacaatatggaactttgctgagacacactttgtctttttaaaaatagtatctattgttctgaatttaatttcaaagttaaaatatgttaaatatacataaaaacttgaaaaacagctatgacaaaacgtaataaataacatttattagacattcaccatatactaggagcatttaaaagttttttaaatttttaaataattatggactcacaaaaagttacaaaaaatagtgcagagaggtcctgtgtacccttctgcaagtttccctcaatggtaaggtcttacctaacgatagcacaatatccaagccaggaagttgactcagtgggtataatccacagaccttattcagacttacttcgttttacatgcactcgtgtgtatgtgtatgtgcgtatgtgtgtgtgtgtgtttctatgcaattttgttgtatgtgtagattcacatggccaccaccacaaccaagatatacagcagttccatcatctcgaagaccatttgtgctacccttttatcgtcatcctgtttccctcccttcatctctaacctctggcaaccgctgatctgttctccacctctataattttgtctttttgagaatgttctataaatggaatatataagtagaaaaataatattaaataacatttactgagcactcactatgtgccaagaactgtttttggttctgtgcaagtataagtttatttgatcctcttcggaacccactgtaatcatctcttttattattcttactttacagatgtggaaactgagattattacccaattttatgcagccagtcactggcagagctgagaggaaaatcaagatctggctctagactctgaggttgtaattatcatattatctctctaaattgagtcagcataaatgtttaagaattaaatacagaaaagcataattaagaaagatcaacagtagccttagaaaacttcaatggattggtgccatacagaccacattctctaagaacagtacaattaagttagaaatcaacaataaaaagggaactggaaaaattccacttgtttatatatttttaaaaaattccttcaaaacaactcatgggtcaaacaaggaaagctgag

SEQ ID NO: 87 - DNA, 4477 bp, Homo sapiens
aagtggtgatgcaagaagtttctaggaaaggccggacaccagctcttttaaaggatctgtcttctcaaggagcctagttggctatgcacaaggaaagcgccaaaagagctaaagggaggaagggaagagaaaacatttaactctcccatggtggttactgacccagcgtgggtgcggggagattgggatgggaagtccaggtctgggggcagccagcagttgtcagtttctcattgacagccctgctccttggagattgtttttgtgggtagtcttgtgtgtggcattggtggaatggctgaatctaggagacgcggcgtgtccagaacttgctggaaattggttttgagattttgggcaaggcctctcaccccgagcctcagttccctccctaataaagcagggctgttataaggataagatgcaatcgtgagggggtgggaaaggactaagagctctgtaaaaatacaaaccaaatgctggtggtgcttccacacctgcggcatttggggtgggggtggtgacaacattgcccacactcaacccacacactcaggagttggggggggctggttcttaagacgagttggcttgcaaaggagtgaacttgagaaggacctgcgcctcgtgtatgtacatttgtttttggccaggcagaggcttacggtgaaaagcccaaggcccagctgacagtggacacaggggaatttgtttgtttgtttcaatccgcatctggagtgagtcattgccacttgtcatggtgaaatggcaaatctgggcttcctgtggttccagaagcctgcgactggaaatccacaagcgagctggtggttgaagctggttaaagaacagcctaggtattccagaagtgtttgaggatcccttccatgaaggaagagaggaaagtttttaagtaaacctcccactcccatgtgtcttcagctttcttttgcaaaggagaaaatccttgaagtttggtaaagaccgagttagtctatctctctttgcctatctcgagttgggctggggagaggaggagataggttcttttgtctttttctgtcttctcccttccccacttccttccctccagtccccactcactcacatgcacacactaaccttggagccgatgggattgagtgactggcacttgggaccacagagaaatgtcagagtgtttggttacagactcaaggaaacctctcattttagagtgctcatttggttttgagcaaaattttggactgtgaagcaaggcattggtgaagacaaaatggcctcgccggctgacagctgtatccagttcacccgccatgccagtgatgttcttctcaaccttaatcgtctccggagtcgagacatcttgactgatgttgtcattgttgtgagccgtgagcagtttagagcccataaaacggtcctcatggcctgcagtggcctgttctatagcatctttacagaccagttgaaatgcaaccttagtgtgatcaatctagatcctgagatcaaccctgagggattctgcatcctcctggacttcatgtacacatctcggctcaatttgcgggagggcaacatcatggctgtgatggccacggctatgtacctgcagatggagcatgttgtggacacttgccggaagtttattaaggccagtgaagcagagatggtttctgccatcaagcctcctcgtgaagagttcctcaacagccggatgctgatgccccaagacatcatggcctatcggggtcgtgaggtggtggagaacaacctgccactgaggagcgcccctgggtgtgagagcagagcctttgcccccagcctgtacagtggcctgtccacaccgccagcctcttattccatgtacagccacctccctgtcagcagcctcctcttctccgatgaggagtttcgggatgtccggatgcctgtggccaaccccttccccaaggagcgggcactcccatgtgatagtgccaggccagtccctggtgagtacagccggccgactttggaggtgtcccccaatgtgtgccacagcaatatctattcacccaaggaaacaatcccagaagaggcacgaagtgatatgcactacagtgtggctgagggcctcaaacctgctgccccctcagcccgaaatgccccctacttcccttgtgacaaggccagcaaagaagaagagagaccctcctcggaagatgagattgccctgcatttcgagccccccaatgcacccctgaaccggaagggtctggttagtccacagagcccccagaaatctgactgccagcccaactcgcccacagagtcctgcagcagtaagaatgcctgcatcctccaggcttctggctcccctccagccaagagccccactgaccccaaagcctgcaactggaagaaatacaagttcatcgtgctcaacagcctcaatcagaatgccaaaccagaggggcctgagcaggctgagctgggccgcctttccccacgagcctacacggccccacctgcctgccagccacccatggagcctgagaaccttgacctccagtccccaaccaagctgagtgccagcggggaggactccaccatcccacaagccagccggctcaataacatcgttaacaggtccatgacgggctctccccgcagcagcagcgagagccactcaccactctacatgcaccccccgaagtgcacgtcctgcggctctcagtccccacagcatgcagagatgtgcctccacaccgctggccccacgttccctgaggagatgggagagacccagtctgagtactcagattctagctgtgagaacggggccttcttctgcaatgagtgtgactgccgcttctctgaggaggcctcactcaagaggcacacgctgcagacccacagtgacaaaccctacaagtgtgaccgctgccaggcctccttccgctacaagggcaacctcgccagccacaagaccgtccataccggtgagaaaccctatcgttgcaacatctgtggggcccagttcaaccggccagccaacctgaaaacccacactcgaattcactctggagagaagccctacaaatgcgaaacctgcggagccagatttgtacaggtggcccacctccgtgcccatgtgcttatccacactggtgagaagccctatccctgtgaaatctgtggcacccgtttccggcaccttcagactctgaagagccacctgcgaatccacacaggagagaaaccttaccattgtgagaagtgtaacctgcatttccgtcacaaaagccagctgcgacttcacttgcgccagaagcatggcgccatcaccaacaccaaggtgcaataccgcgtgtcagccactgacctgcctccggagctccccaaagcctgctgaagcatggagtgttgatgctttcgtctccagccccttctcagaatctacccaaaggatactgtaacactttacaatgttcatcccatgatgtagtgcctctttcatccactagtgcaaatcatagctgggggttgggggtggtgggggtcggggcctgggggactgggagccgcagcagctccccctcccccactgccataaaacattaagaaaatcatattgcttcttctcctatgtgtaaggtgaaccatgtcagcaaaaagcaaaatcattttatatgtcaaagcaggggagtatgcaaaagttctgacttgactttagtctgcaaaatgaggaatgtatatgttttgtgggaacagatgtttcttttgtatgtaaatgtgcattcttttaaaagacaagacttcagtatgttgtcaaagagagggctttaatttttttaaccaaaggtgaaggaatatatggcagagttgtaaatatataaatatatatatatatataaaataaatatatataaacctaaaaaagatatattaaaaatataaaactgcgttaaaggctcgattttgtatctgcaggcagacacggatctgagaatctttattgagaaagagcacttaagagaatattttaagtattgcatctgtataagtaagaaaatattttgtctaaaatgcctcagtgtatttgtatttttttgcaagtgaaggtttacaatttacaaagtgtgtattaaaaaaaacaaaaagaacaaaaaaatctgcagaaggaaaaatgtgtaattttgttctagttttcagtttgtatatacccgtacaacgtgtcctcacggtgccttttttcacggaagttttcaatgatgggcgagcgtgcaccatccctttttgaagtgtaggcagacacagggacttgaagttgttactaactaaactctctttgggaatgtttgtctcatcccattctgcgtcatgcttgtgttataactactccggagacagggtttggctgtgtctaaactgcattaccgcgttgtaaaatatagctgtacaaatataagaataaaatgttgaaaagtcaaac

SEQ ID NO: 88 - protein, 702 aa, Homo sapiens
MDADSCIQFTRHASDVLLNLNRLRSRDILTDVVIVVSREQFRAHKTVLMACSGLFYSIFTDQLKCNLSVINLDPEINPEGFCILLDFMYTSRLNLREGNIMAVMATAMYLQMEHVVDTCRKFIKASEAEMVSAIKPPREEFLNSRMLMPQDIMAYRGREVVENNLPLRSAPGCESRAFAPSKGLSTPPASYSMYSHLPVSSLLFSDEEFRDVRMPVANPFPKERALPCDSARPVPGEYSRPTLEVSPNVCHSNIYSPKETIPEEARSDMHYSVAEGLKPAAPSARNAPYFPCDKASKEEERPSSEDEIALHFEPPNAPLNRKGLVSPQSPQKSDCQPNSPTESCSSKNACILQASGSPPAKSPTDPKACNWKKYKFIVLNSLNQNAKPEGPEQAELGRLSPRAYTAPPACQPPMEPENLDLQSPTKLSASGEDSTIPQASRLNNIVNRSMTGSPRSSSESHSPLYMHPPKCTSCGSQSPQHAEMCLHTAGPTFPEEMGETQSEYSDSSCENGAFFCNECDCRFSEEASLKRHTLQTHSDKPYKCDRCQASFRYKGNLASHKTVHTGEKPYRCNICGAQFNRPANLKTHTRIHSGEKPYKCETCGARFVQVAHLRAHVLIHTGEKPYPCEICGTRFRHLQTLKSHLRIHTGEKPYHCEKCNLHFRHKSQLRLHLRQKHGAITNTKVQYRVSATDLPPELPKAC

SEQ ID NO: 89 - DNA, 3528 bp, Homo sapiens
ggcccctcgagcctcgaaccggaacctccaaatccgagacgctctgcttatgaggacctcgaaatatgccggccagtgaaaaaatcttgtggctttgagggcttttggttggccaggggcagtaaaaatctcggagagctgacaccaagtcctcccctgccacgtagcagtggtaaagtccgaagctcaaattccgagaattgagctctgttgattcttagaactggggttcttagaagtggtgatgcaagaagtttctaggaaaggccggacaccaggttttgagcaaaattttggactgtgaagcaaggcattggtgaagacaaaatggcctcgccggctgacagctgtatccagttcacccgccatgccagtgatgttcttctcaaccttaatcgtctccggagtcgagacatcttgactgatgttgtcattgttgtgagccgtgagcagtttagagcccataaaacggtcctcatggcctgcagtggcctgttctatagcatctttacagaccagttgaaatgcaaccttagtgtgatcaatctagatcctgagatcaaccctgagggattctgcatcctcctggacttcatgtacacatctcggctcaatttgcgggagggcaacatcatggctgtgatggccacggctatgtacctgcagatggagcatgttgtggacacttgccggaagtttattaaggccagtgaagcagagatggtttctgccatcaagcctcctcgtgaagagttcctcaacagccggatgctgatgccccaagacatcatggcctatcggggtcgtgaggtggtggagaacaacctgccactgaggagcgcccctgggtgtgagagcagagcctttgcccccagcctgtacagtggcctgtccacaccgccagcctcttattccatgtacagccacctccctgtcagcagcctcctcttctccgatgaggagtttcgggatgtccggatgcctgtggccaaccccttccccaaggagcgggcactcccatgtgatagtgccaggccagtccctggtgagtacagccggccgactttggaggtgtcccccaatgtgtgccacagcaatatctattcacccaaggaaacaatcccagaagaggcacgaagtgatatgcactacagtgtggctgagggcctcaaacctgctgccccctcagcccgaaatgccccctacttcccttgtgacaaggccagcaaagaagaagagagaccctcctcggaagatgagattgccctgcatttcgagccccccaatgcacccctgaaccggaagggtctggttagtccacagagcccccagaaatctgactgccagcccaactcgcccacagagtcctgcagcagtaagaatgcctgcatcctccaggcttctggctcccctccagccaagagccccactgaccccaaagcctgcaactggaagaaatacaagttcatcgtgctcaacagcctcaatcagaatgccaaaccagaggggcctgagcaggctgagctgggccgcctttccccacgagcctacacggccccacctgcctgccagccacccatggagcctgagaaccttgacctccagtccccaaccaagctgagtgccagcggggaggactccaccatcccacaagccagccggctcaataacatcgttaacaggtccatgacgggctctccccgcagcagcagcgagagccactcaccactctacatgcaccccccgaagtgcacgtcctgcggctctcagtccccacagcatgcagagatgtgcctccacaccgctggccccacgttccctgaggagatgggagagacccagtctgagtactcagattctagctgtgagaacggggccttcttctgcaatgagtgtgactgccgcttctctgaggaggcctcactcaagaggcacacgctgcagacccacagtgacaaaccctacaagtgtgaccgctgccaggcctccttccgctacaagggcaacctcgccagccacaagaccgtccataccggtgagaaaccctatcgttgcaacatctgtggggcccagttcaaccggccagccaacctgaaaacccacactcgaattcactctggagagaagccctacaaatgcgaaacctgcggagccagatttgtacaggtggcccacctccgtgcccatgtgcttatccacactggtgagaagccctatccctgtgaaatctgtggcacccgtttccggcaccttcagactctgaagagccacctgcgaatccacacaggagagaaaccttaccattgtgagaagtgtaacctgcatttccgtcacaaaagccagctgcgacttcacttgcgccagaagcatggcgccatcaccaacaccaaggtgcaataccgcgtgtcagccactgacctgcctccggagctccccaaagcctgctgaagcatggagtgttgatgctttcgtctccagccccttctcagaatctacccaaaggatactgtaacactttacaatgttcatcccatgatgtagtgcctctttcatccactagtgcaaatcatagctgggggttgggggtggtgggggtcggggcctgggggactgggagccgcagcagctccccctcccccactgccataaaacattaagaaaatcatattgcttcttctcctatgtgtaaggtgaaccatgtcagcaaaaagcaaaatcattttatatgtcaaagcaggggagtatgcaaaagttctgacttgactttagtctgcaaaatgaggaatgtatatgttttgtgggaacagatgtttcttttgtatgtaaatgtgcattcttttaaaagacaagacttcagtatgttgtcaaagagagggctttaatttttttaaccaaaggtgaaggaatatatggcagagttgtaaatatataaatatatatatatatataaaataaatatatataaacctaaaaaagatatattaaaaatataaaactgcgttaaaggctcgattttgtatctgcaggcagacacggatctgagaatctttattgagaaagagcacttaagagaatattttaagtattgcatctgtataagtaagaaaatattttgtctaaaatgcctcagtgtatttgtatttttttgcaagtgaaggtttacaatttacaaagtgtgtattaaaaaaaacaaaaagaacaaaaaaatctgcagaaggaaaaatgtgtaattttgttctagttttcagtttgtatatacccgtacaacgtgtcctcacggtgccttttttcacggaagttttcaatgatgggcgagcgtgcaccatccctttttgaagtgtaggcagacacagggacttgaagttgttactaactaaactctctttgggaatgtttgtctcatcccattctgcgtcatgcttgtgttataactactccggagacagggtttggctgtgtctaaactgcattaccgcgttgtaaaatatagctgtacaaatataagaataaaatgttgaaaagtcaaac

SEQ ID NO: 90 - protein, 702 aa, Homo sapiens; identical to SEQ ID NO: 88

SEQ ID NO: 91 - DNA, 373323 bp, Mus musculus
  misc_feature (1)...(373323): n = A, C, G or T/U
taactgcagatttccacaatgtctcacccatcttggctgccacccaaaagcactggtgagcctcttggccacgtgcctgcacggatggagaccacccattcttttgggaaccccagtatctcagtgtcaacacaacagccacccaagaagtatgctccagttgttgctccgaaacccaagtataacccatacaagcagcctggaggagagggtgagttctggtgactagagtgggaaatgagcgtaaaagatgtgatttgctgtagagttgtgttggtcgtttctcattatatttcctacagtttatgaagtgtccggttttccccagctccctattgtcagttacaccaactgcatttcagaaacaaagaggttaaatctcacagagttgggttcgtaaagtaataaatatctaggataatacatatccattgctatttattactctaaaacagaaacatgaccttttcaagtgtgactcagaacctttctatagccttatactcatccttccctattcttctgtggggatatgttcaccacccagtgtagctatcaggcaagtgccaaaatgtcaccaagcaatagtccagtgagaaagcattaggacacaaaccctgtgaaatccctgggaccctgctgctgcttactctctccctgggagaagactgtccttggaggccctgggtgttgaagtcctagatggttcagagcaaaccttagttgcagtggtttttactagcaatgtattcattttacatcaagtggattttgaatgtctagatgagctgagcatccagtgtgtggttatactgtggctctcacattaacaaagttgagcagtacagtctttgtggtagaagagactccgtatttatcccagtcatgtcacgagctccttcacacccatgaagcagtaacctaagactaatatatagaacagtgtaagacttctagaagctgagaacagaagatgtgcgctcacaagatttcatctctttctcgattttgtgccccatctatcttctcaaaaatgactgttctgtttctacagttgccatcattgtgttcttagatacatcttttgtatttgttgtagcaatgttgtggggacctatgttatgccctgtagtgttgcctcttctctctgttttttttttttttttttttattttgagtccttcccacctcccagcaaccacatcattaatccacccgtttacctaggcctttggcctcctggtgttttaggactcttttcagaaacaagatacacatgtcttgcttgtgctaacaagctgcaggctaagaggttatgagaagaaaggccaggcctctctctatactgggtgttgtggatctttaggagtctctgtgtgtccttcccttcgcattgtcaaggcatgagcatgcctttctggaaaacgtgcttgctgtccatggacttcctgaccccagtgtctgggctggaagcttccacacccatgtaggacactgaacttctgcaggtgactatggtccttgtgaagctggtttgcactggcttattctcctctaagggctgtagggttcatccttactgaagaggagggagagccaaggggtggcttcctggtttgtttccttaccatttccttttgtgtgatttagaaggcacctttagttcttctcctattgaggaattcaaatagacttcttactaatcgggagagaacaaagacaaagtattaacacagaaaaaggtgtccatgaggaagcttgtagtggatatgggagttaattatatgcccagaggttagattgtgactagagtctgcatgaaaacacatgggccatcaggggaaaaaaaaacatacaatgatgtctctttcatttcttctctctgaatgccattgagtcttagtgagacaagcccttagttgtcctctgccttgccctgctcctggctcgtgatgcccctgcctctactccatatggcaaggccactgaattgccctcaccccactcacagcttcttgtcccttgccaccctattgcatttgttgcctgcctggatcctgttggtagccctttgcccacaatgtttggtgcatcctgaacgagaagcagtcacttccctctccgcaagcatgctactgtctccctgcagcatggctacacttctcactaatgctccacttgtctgcacttactgagcatgtagtgtatgctgtacactgcattcctcctcctgcacttactgaccatgcagtgtatggcacacacactctctctctctgcggtattcagctgcctgttcagagaaccctctgaactagcttgcacccacatccacaaggacattgaaactttgagaggggagatggccctcactgtattttctggttagggattatgtgtgccaaggctgttgtacagtgtgtacctttactctgtataattctgtttcatttttttccgtgagcttttcatttgaggggttgtctaaacactgctgccttcaagtagtgattacactgctccattactattatgtctgtgatctctggggttggctttcttatttttttccttctgactgtgaaagtagaaaggacccacatgctttccacatcaacttatatttatgtgatacccatatgttataattttcttgtataaaacaccatgctaataacctttgtgtaaagggttttgacacacagtgggtgtgtttttttcccaggcagtggttctttaggccttagccccttgattttcataaaatttaaaagaatttgtattttctccatgttttgaatgcccctacatttttaccttctctctatccagtactgaatgctgagctgtgttctttgtgtgtgtgtgtgtgtttgttgttgttgttgtagtatgttacagaatgcatatttaaatatatactatatagtatatctatatatcaatatattgatatagatagatagtaaagttctttggtttccattatgagagtttttttcctcaagggaaatgatatgacacaattttgttctggttcttaaagtgcaacctcaagtattctttattttgttttctggcctctgccttcagaacaaccaggaaaactgtaaggcagaaccagagccatgaaccttaaactttaacggtacaggaatctgaaattctttttctgctcttcacgggttgtgaaatatatggactttcctatggttttgcttatctcaaatggttttgaggttattctgttgtctgcctgcccgcctgtttgcctgtttctgtttctccatcgtctgaaaaagacaagtttgtatagttggagttgtcttgtggtgtagaattatctttctgtaatctctaaaattccgttcacaagacatttttgtatttacaagtgcaggtgtagagtgcaggtgatggaggggcagtcagtcaggatgtagagtgtaggtgatggaggacagtcatgctgtagagtgtatgtgatgtaggggcagacagtcatgctattgagtgtaggtgatggaggggcaatcagtcagactgtagagtgtaggtgatagaggggtagtcagtcaggctgtagagtgtaggtgatggaggggcagacagtcatgttattgagtgtaggtgatggaggggcagcacctttcatgttggtttagtcctttgcagtttacttggcatttgcatttcattttttgtttttaaatttccaaagataatttttactactgctttctctggcagacagaacagatgttatttctatttactgattgctagaccacagaaatgaaacagcttattaaagaatgatttaacgggctgagtatatagttctgaatatagtgcctgcatacctgcatgcatgcaaatgcacacacatgtgtggatgtgtgtgtatgggtgcatacacactcacacacacatcatatgataaagaaactgtttctttgtaaccacattcatgtttatctttaagatttttaaacttttaaaagaactttaatattttaatttacatgtatgagtgtttgcatgcatggctgtctgtgggttccctagaactggagttataaacaattgtcagatgccatgtgtgtggtgctgggactcaaacccaggtcaatgttcttaacccctgagccatcttttcagttcctgattataagattttaaaatactttatccataagctatttatctaggcaaccaccaccttgatacaactccagtattttattatttcatggttttttttgacgtaaattcacaggttgaacatttccacgaactgttctttaatatattcccttgtgcacgtctatgcctctatgtcataagcaatgcttgtgctttccttgcttgacctgagcttttgaaggcagaacgggtgagctgaatggcatcagtgggaccgctcggctgctcggtttcctttcccactcttatctcatgttagtaaatccgcaccatgcagaggaaagagttttacatcaataacgtgacatagtaaccaatggccccagtaaccttaagaactggatttccctggtagaaattagttcatgtttagttcttttctgtgttcatagttgggccattttaggcaaattaatatggagtttttgagtattagaaataggaagggtttgaaaattgttttgcttagcccttcccttttattggctgaggaaacttcatcacttagatacacaagttccctaccagctgcactccatcataccctaaagcacctatgctagagcacggaggtgtcctatatagactcataaagtcctagccccgcccaagagtcgctttgctcttcaggcaaggtcatcttgtatgtgtctttggaactacagatagcaaacatcttttcatatgcttattaaatcatcagtgagttgcaatgtgttagattttggttatatttctgagtgtgccttaaggatcctcattattcactgaaatgctattaattctcctgagcctgtagttgactgccatgccccttctcaggagcaatgtagggatctcagcctcatctgttgctatggcgtgcaggacatggcttctaattttctggttctcatgggcaaagaggaccagctgtttcttcatttaggaattacctactaattgtgttaatttggtctttacatcttcttgaagaagaaagtatttgcaattcatgggatgttatcagatcagaacaggaattgctaaccctccctgctacctagcttcatggcacagcacaaagcggagggtctgtctaggccagcagtttttaacctgtgggttacaaccaacccctttggagatcatatatcagatatcctacatatcagatatttatattccaatttataatagtagcaaaattacacttatgaagtagaaaaaaaccaaccaattttatgattgtagattagcacaacatgagggacagcatcaaagggtcatagcattcagaaggttaagaaccaaagagctaggcacttacactcatgtcatggttttagaacacatttggacagagtccttttcttcttcagttttgttttacaaagggacctacttgggaatactatcattaagactttcagggtccactatgatgggaagtatgagatatttttaaaggcagagtatttcacaatctcagcaagctgtcactctgtgcccaacacacaattacataaaacgtaggtatttgtgggaaacactcttcttggggctgaagtaatgaaagttagcaatatggagattctttgcagagagaatgtattttcttttaaaatagacatgagttattgacactaatattttgtaaccttgataatttataaaatattatttagattacaagtataggtataatcacacaatactattgctagtaatcctaaattatgagctgtgatacttagtaatatgaataatttattaataatggcctccataagtaccaatagtattcctaagattatagtgttaaaaatcactctgcctaaatgttacaaacagaaaaaaattcataactccaggcaggcagaatccttaaacttatcctcatttaatttctcatttcctaaataagaaatgattcttaaatctcttcaaagaaaatacacagacattgcctgggaatgctgtacggtgagattgaccgttgagcaggctggagttattatcctggttttagagactcagatcgtcctgagtgacttgttgagctgaggtgtggacgtgtgggataccttcaatgattatgcgagttgtgcgtcacagatgcatttgtgatgacttgtttggaagctgccccgagaactaagatacaacacgagcagagtagattagatgttttcgcacaaagagatgttcatgtaattggtgacaaaattctcattcattttgtagtctgtcagcctaattaactgttgaagtgaatttgtaataaggtgatggattcacaatacttaaacagtttgaaaaacagtgattaatgctgatttgtatgggaggtaatttttatttgtctccactttaaaatatgaaaatgtatatcattctaggtgtgttttgaacttgaatagctatttttttttctgtaagtaaaaatggagaacaggacagtaaggacttattcaggcataggcaggtgaagtgaaagatacacttatgggaatgagtccacactgcatacctccatccccagacacttttgagatgagaaacctccagagatgagtgattgctcatggccagagatagaaagagtgggacacaatgcaggtgtcttgccaacaggcatcagaagtcttcttgtgtggcgaatttgggtggttccaagtatgtaatcctgcgacatgttgcatagagcttaccctggtgggtagaagcccaaaatgctggagtggactgagagtcatccagtgcagtcttaagttctccatttctggtcttggtgattcacagtagctatatgctcggttgccatgggaagaagctgggcatgctcctccttagattttatgctattttgggaaatttctgttagtccatattttccaataatatttttaaaaacgtgttataaagaagtacatgattttataaaatctatatatttatgataacttacataaatcatacattttacggtcattgttatggctagtttaaacttagttttcaatggtatctggtcttcccaaaacttgaaagacaacagaaaagcaatccatgtcctaatcagttatttttaataaatagtattcccaggtaattctgagtgtattcaactaaagcaccgtcatcaagaatttagcccaataccaccaaggtcctgatttgatgctagagtacgcctcctgttgctctccccttggtcatggccagtagctgtgaaatcttgagcatctgttctgtgagcagctgttgagaaccaaaatccttcttcctaatgctgcacctatcgctctgaactctcttctctggtattagacgtttacataaggttgtttaaagaattttgcttaggatacaaaagcaggtttaaaagtaaaggcatagtgtccttcctctaggatggctttatgatactcaaccttctatattccaggtcttttactattttgttaacttcttatagtgatgtctgaaatctccgctgattttgggtcatggcaagtctatgtaaatcatctattaatggattcattatgactactattaaaaaaaaattcgacactcgagcctttgggcaaatagactatatagagaaactgtggcctagaatcatgattgacccaaggagctgtaaaattattcattgtatggtatttgtgtcatccttccttaaaaatactcagagactgggctgttgagaataaaacccaggtcataggagggcatatcccagggatgtggtaccctgaggctccctgcatttccccgtcaacattctctgaaattctgtcccattttccatgtgtttctgtattcaaggttagatggtctgcggtcctgaggtatctcatacagaaggtcacattatttaaatttagtgttatgaaagaattagagtgacctgttataggaacactgggaaatgctctgcagagatgtatatttgattgacatctgagagaaagagttcaggcttcaccaggcaggaaagcatgccagtctttgcggccaatgaatgcacaagcagagggtagagctctcggttacacttggggcattagctgctctttttctaatgtcctcaaaagtacatgggaacccgtaggggcttctcttcagtgagaacagagcgaattcattacgggcagagccatgttaccattaatctcttcccttacgtttaagctgagtaactacagagagcaaagcacattcctgtcccacagcatgtcctgatgcatgtttctggtgtggtgttaagcagaggatgggcagtccttgcttcatctctggtaccttatgctgaaatgtttctgtgtaaatggatgctaaaaggggagccattccgggtgattttcatgagactgaagacagactttaaccgttttaagcatacaccctctagaaagcgaggcaggatcaaacttaaaccttttgatctatcgttctttcttagttatccacacacttggcaatgattctgagaaaagaagcgttttgtttctaaatatttgctactactttaaagattgtgtatacaggtacagttttgtgtcaccatctcactctcctggttgaattttcaaagggccctcaaactatattattgtcttcacaatgacattatcattgttcctagtaataagtgagtaaccggagactcagcaggcccacagggagactaataatgtggaagccacatgcaatcaaatattagtatttcctcatattaataatttacacaagccagtgtataataatcatacatgctagcaagtgttctatcagaggcctttatctcagtcctatccactgacttgaccatttgtctcttgaataatgtctacaggatgtaaatctctttttgttggatgtatactccttactgtatgtgaagtcacaccttttctgtaaagaatactgccacttgtggacaacagagaaaatgtacacacgatggacacagtcacccagggtaaaactgtgacttgaatctttgtcccttattctaaggccatgtcttttccatgcaccaaattctaaattaatggtcttgctatgtagttcattagaatgagcaacatttttcactgttacttcctcgctgactaactgagagttactagacattcatccgcatctttacatatgacgtcaaacccctggtcacggacagggatgcggtatagtcgtgtctaccagtcagagtaatctgaagttactgccaaggagatattgttacagaggatcttgggaactgctgcttgcagtgtccactaatttaagtgagttgtggcatcttgtttaaacttctcaggtgacattggtagttgtaatgacattagaatgaaagcaaaatgacattttaacctgtcattatttcatattggcctgttaattttgatggtagtgatttcagttttatgaagtgcttcctcttctaaaattactgtcggtaaaagaaatctacaggttgtatgacttgttcctggaagtgtcatctaatataggatctcttaaggagattcgactttctcacatcttgaaatcatattaatacccttctatcattaattctagttcagatctatatgattttttttatagttttcattctttttgatcccggatctcactgtctattcctgtctggcctggcattctctacatagaccaggctgacttcaaactcacaggtatttttctgccttgatgtcccaagttctaggattgaagccatggtcatctcaccgcacctgtcaatccatttttagttaacaatgtcacacaactataacttaagccattcccacaccttgtaaaaactttacatttttatgagaaagttgatatattaaaatgaccatttggctaagaatataaagatttagttataaagcccctgtttggaaaatgacttcatgtttaactatcagagaaatccgaataattagtttgcttgggtacagactactggaagactgacagaatggaaacagacatgggaaaagctcttgtctgctgtatggactccagtgaaagagttctgagctctacttttgccttcagactttaatttctctggggattgctgtgctcggctgagtatacaaagtgctattggttgtgattgtggagtagagatgcaagcatctcagtcagtcaggagccttaagtggggcaagagtcggcactgcatctgaggtagaacagtagtcagtagatggtgccacgagcatctttgctgttattaaaattaaagcatgaatgttactctggggctcttagtccattacatttttttttatgtttataactacaactggtaccatacaattcatcctggcagtttaattcattattctgtggtgttcctttgcatgcgctatatactcggtgcctgggactttcaaattggtttgggttttgtttctcctcgcattatggcaggtagatctgtctgttgtatgctttcagttattatgaaattcagtcagtctcccgtctccacttggtccactggtgtccccagatactcaagtacttcccaagtagtcactgctttcaaatgagttatattagtgttgtttaaataataactaggctcccttctcttctcctcacccccatattttgtgcatagtatataagaagaggacttgatagttggtgctagtcctggagcttcataattaggaatcaccaggaatatgcgtatatatacttctaatgtggttttgaaacaattcatattttttcttgttttttttttttttcagttgagaaggaatcacacacctcccctggtctatgtctggcttataagacaggataggaatggatgtcctcagagacttcctgctgagaatcaggccagagaggaattcttacctccactgcacaggtagccagcctgaggtttgctttaaggcattggtgcctatccgtgatcgtaggaagtagtcaaggggagacccacgcacagctcttaagactccaaacgagcatcttaagcactaacatgatttttgttgcctagcacataagtagtacctgtacattttaatttattcctcttacatgggaatttaaaatgccatatttttttctgcttccattattgtagttttgagtgatgattcatcagcgcaatggcctatttaagtgaaccacaatagcttgggtagaaagaaaaaaaaaaaaaaagattcaacatactcaggaatggaaagcagccatctttttatagctaaaattgcaaacatctggcaattaccctcttctacctcccctccaaagcgaagaattgtcccttcaaccggagcctgctgctgtgtttaatcaagacagctatgcaagccttaaggagcaataggttttgattcaaggaggccattgcctcacccacttggacagagaagctttggaaaacacaccgcgtaatgttccccatatgctactgtgttacataatgatactagtggtggcatggcagttaataactatagaaagccagcccggctactcagtccaactttcttgtgtggctctctaagcagttgtcatatttgaaatgtttactggtcaggtcaagttcgcctctctgtatcttcttaaaccttttgtgtcctgggtcaaagagtctactaaatcaacccagctaatagtttctgacttgattgttttataaagcggtctagggatgttgaaggaataaatccatgtcctttgaacacttggccttgccctttcagtgaaacatcttactctcctaccccaccctcatctcttcctctgatcattttttatgaaactacttcttccttgactggcaaaagccgtctctgtgggcaagggaagtgagagaggctggtggtttgcaatagatgctgagaatggtgacttcctcatctttctttttctcagggctgacccgtatgttcactgtggccctggcaatgcctttcttttctgttcccatgtatctttcctgtcctctgggtctctgaaggctagaggtgaacttcacctttcacatcttgggctgttcccattcgtcaaaggggatcatgggaaagatttttacttatcactggacaaggtatagtaggaacagaaatcaaggttcagtgtcctggtggttctcaaaaacagtctcacatactaaaaataggccattctcttgtcctagtattatgctgcctttagtcatagacttactgtgaggcctttgagagctttattcccttgctatatgttatttcaccttggtaccactgcattgaatgattggaactagagctttctccctggctttactaggccatccattcccaaagtctgagtgaaatctgttaacacctcatcaaactaagtctgatttgggaagagtgaatgggcaaagtttctagcttaaaaaatgaaggtagggatgggaactttaaataacctaaagtgcacaggttattcaacacagttactccatgtaaagtcagataaaatgatggtgtctgtaacatcaaaaagaatgtgctcacttctgtcagtccttgcccatttatatggtgatcaccttgttctaggtatgcatcttcaacttgaaatactttattatcaccagtattgtcaccatgacatgtttccttcatactacatttattcaatgatccatcccacatttcacttttaccaacagagttacagtctataaactcatttaaaaatatttatttagttactttacatcccagtctcccagccccttgactccttccagtacccctgcttacatgaggcaatgaacttggactcttttgggcttccctagactaaaggttcaagcaagcgctcacagggctgcttgttaagttttaggttgttcaacctttgacctaggttatcttgtttgccagttcagatatctcttagtactttgatatttcctttttctttttatgaaaataggataattatgtctctcctctgtctgtatcagtcacttgtaatgttcctatcatagttacacagcatcgggacttgtgtatagaggaccaaatccacaggctggctggaaaagtgatcatgtctttggaagcttgcatgatctcagtacagaggcagcagtagctgttgctctctgaccctttgctgctttggtctttggtgtgtgtttggagcatttcccatccataaacacctggagtagacgcatgatgaggactccttcctaaaatgtaggaaagtctctgaagcaacctatgggaacagacacataactcaaagcctgatgtttaagcacaagtttgatcaagtaaagatgcttttacagtgtgcttgacaatgttggtcttctctcttagcatgccctggattcagatttttgatatagatttttatgtgttccatccattgcataatttgaaacacacacacacacacacacacacacacacacacacacacaccaggtctcttagcttcttaataattttattatttcatagatctgcagacataattccattaaatagaggactcttctgagaaatcttttgctaatggtaaatttaaagctttttgttgttgttgttgttgttttctgatcacatttctctgggttgaattaatccatatataaacattactagttttatagtgaaattgccatctgccatcatgttgtcttatccttcaacatggtctagctgagaccaggtccaaatcttggctaagtctctgtctggtgactatagagaatcttcattcttttgtacaacgaatttggcacatattatcatgccattaagtggaagtggttttggaagtggaaggagaataaagctggagccccaggggaggatggagacttggagaatgatgggtaccatgcaggtggcatcagaccacccttactaccactgcttttcccactctttgaagaataatggtttctcctaactacttagagccttttcaagtttggctttgttctgaacagcactcctagatcgtcttcatgcatgctcagtataaaagactgtgggtgggaaagatctaccaggcttaatgctgatgttttgtcttagtaacactgactagaaggtggcatgcagccagatagggttaacaggacatcagggaggttgtggaaatgtgtgaaaatggacaaaacacaccagtaatcacaatagttaccaaacaatgggctagttttctcagttgtcaaaacagtgtgacagaacaactcagcttcatttccatccagatctaaactgtaggatggtgctattcactttcagcaattgtttgacaatggtttactcctgaaagacatggaatcaaattgtttccacaaaacacaaatttagttatgttataaaattgacctttggatgtctactctgtgttccctgtcagcagtcccatgggttaatgttttacttgttctttctccaaagtctttgcacagtgtatgttcacatgcttaagtgtatctagtttactagtgagatctcattaagcatgttccggtttcttgttatatcctttttatagcattattacagcttggcactaacattttttgttttgaaacaaattaaattgaaactcagacagataataaacaagctatccaaggtcttgtggcttacaaaaaaaaatggagactttgatttgagtacagctatgtctaaatgccagttccatagtctaatgttccgacttgtaaagtctgtgtaagaatttttttgttgagtgtgcacacactgaactatggataactgtgtggctataggtagatagatatcaaaattggaagggaacaaatttgtttttgaaagtgtgtcagagtggaacccagccaggacaacttcaattttgataaaaattaaaaccttaaaggaatgaatggaatttgagtaataaaagctcacagtgatggtgacggaaactgtcagcctgctgtctttgtaaagatgttatagattatcctatgtgagcttgctttgaagctttgaatgtagaaaaggtaactgaaaatgtctattgtttagaaatgttgtaactgtgtgtgtgtgtatgtgtgtgtgtgtgtatgtgtgtgtgtatgtgtgtgtgtatgtgtgtgtatgtgtgtgtatgtgtgtatgtgtgtatatgtgtgtgtatgtgtgtatatgtgtgtgtatgtgtgtgtatgtgtgtgtgtatgtgtgtgtgtgtatgtgtgtgtatgtatgtgtgtatgtgtgtgtgtgtatgtgtgtgtgtatgcgtgtgtatgtgtttgtatgtgtatgtgctcttgcatgctcatgcctttgaatgtgtttctgtgtgtctttataactcatggaattcagttctctttgatgctttggttttgttgattacattcaggtcaacaagctttgtgcttctacctccagggcccatcttgagagcccaataaaaaaatcccaggttgactcttcgatggaggaattgatagaaaagtagattaaatggttgcatctttccagctgtctgaaggaaatatcaatccaggatagcaatgatcccccttgagaatctttactcgtatcttatatattttactgtcttctccttgatttcttggtctgttcagaggtctccttttgtaagaaactcctaactcttcctgaagctttaaccactggggtaaatgggtgggcaagctgaataggagactcagggaagggaactgaagcccaacacttagttgtacacacattgagcaaacacatgggtttttcatgttttctgccctgagctggttaggattggaaacagaaaaatgtaatctttgcctggctctttatagtagtaaaggaataagaaattaaagcctgaccaagaaggatcttaagagaccttatccaagatggagagatgaattcagaactttcccacaaatgatgtaaggaactattgtcttaataggtaactcagaactcttaaagaagtacattgcagtgtatcagctgctgcaggaatgggtactgggcaaccgccatagcccctcccttaaaggaggataaatcctttgactccatgtgcaaaggagctcagggaatactgatctgcagcagtgagagggttaaaaaagtccatcattgtataagaggccctgcgatcttgtctgaaccatgtcaggatgttgcctgcacgctgtctttgctgatcacagtaatccggtcataagagaaagagaagtaataagagtgtctcttagcaaccaaccccaggagaaagagaaaattactcaaactgagccattcagctagggaagtagaaagaaaaatattctgaaagtctgaaaatgctcaagttcagtcttcaatgccgcagacagaggtggcaggctggggtgggtgtgttagtaacaaaaatctgtgagaaattgaaatgttctctctttcgctttccttctgtttcctgccacctcaccctataagatacaggagtaagaaagggtgagccaaagaaggctaaaaagtccttctttcccactataggacctgggtggttgaagcatgggagaagagaaacggaactcactcactctctctctctctctctctctctctctctctgtgtgtgtgtgtgtgtgtgtgtgtgtgtgtgtgtgtgtgtgtgtgtgtgtgccatgcaggtgctaatgcatgcatgtgcctgcatttgtgtggtatgtgtgctctggcctgtttgtgtgctcctgtgtgtgcagagatgcatgtgtgtgcacatacacaaacacatctacgtgtgcaagtgtgtatggcagaggttcatttacccagcttgtccagtggcgatcaggattgctctttagagggagaagtgtgaaatctaggggtgtgattcctttctgaagacttgctttgcccttactgcatactaattggctctgtaatgtgtaggtgtcagctgtgaagctatgtatgcttgtacactttgttctatgatagttttaaccctgcccccttttcttacaaatatcagtaagaggtacattttacactgacagttgtgcgtcacacatgtatgtaatttgaagtgagagtttctttacatatgcttttaaggtatatgttattcactgtactttctattgtctgtcattttcaagtgctgttgaagcccactgaactgatattgtggtccttcatgagtgagtatcttttcccctctgatgaaactagagggtaaatttagaatttgccttaaattttgatttgatcaaagtgtcacaaagcaagtatagtcatggagaagaatcctggggcaaaactgtaatattcagggtcatagttactttaaattcttttttttttctgttaagtcaccatatcctaatagcttagctggcttccatttatggaagtaaacccaaggcacttcctctagactgtcagtgtgtagaagcaagtcacgaggtagccaggaatcactgcgttgggtaattttgcacgtcactccggtttgtaacatactggaatctggagcgggaagtggccttgcaaatcattcagtcttatgcatttctaagattcaatttcagaaaaacactgattgacttctgcctctctataaggatgttatgaactaatatttataatttagttatattaataatattataggggaatattagatatatgtatatacatgtatatatataaagttatagatatacgagtgtgtgtgttgtatgcatgtgtgtgagtatgatcttcgggaaagtgcgacttgttgaaaactatgtgtggtggaaaattcaacgtgggaaaaaaaacagaaaagagggtttgaaataatagtctcaaggttgcaaaagtctagaaagagaaagcctttgtatcaggtcccctggacatgagaatacttggagaccatatttgttagttcatggagagagagagagtcaagtagagtacatgtcgtaagtaatttgaaaagggaaattctttttgctcccttgagtttgttgcagtgatttcacactcatcagtttcggtatttttctatattgtgtaacgtattttgtcccctactagcctgcatgtctcattgccagctgcttgatggcaaggtggggtttcattagtagtgggcagtatgactggctcttggaaaccattcttacataaagatatggtgtacatgccctcggagttggaagaaaataaacagggacctacaaattaatatctgttgtctttttgtaacaaatgacacttgaattttgttgctgcttttctattttcttaaggcagaaattttatttgattgcactttttagtagtttattggccacagaaagaccctctgttagtgcgtatgctagagatattctcaagtgatgtccccttctgagccagactgagctttgtaattaaacgagaattagcagaagtatgtcgtgcctgtattcctactctgctagtaccttttggtgagggtgctccaagttctcatatatctaacactactgtctagctcttcctattatcgcagtggagtagacagacagggatgctgttttctcatagcttggtctctgactcagttccttgatagaaatttattctttattctttattcttcatctgtctcaaacataacattaacggtgacagaagccaagaaaacctttcagtattgcatggtgtcttataacacacatggagaaccattactctatttgatctttaggactctttgatatctaaatgccaggggttattctcattttatggagcttgaactgagtctacacagctgtttccacatagtatcactggctataaaattgcagagtggatgatcagaacggccagtgtttggaacctgagtagactattttaggaagtgtaaaccccctaaaatttgaggccagactttgtttcaccttttacaatgctgttcacataatatgacttagaaaatgagatgatgatgatgatggtggtggtggttgtggtgttggtgttggtagtggtagactttctaagtcccactccacactgctgttttgaataaggttttgtcccagggatgtctctccagactttctttatgagaggtctctgagaagactggaacctctgttcaaaacccctgcttttgatgagcatggtaagtgatacacattcatttagctgttacaaagaaaagttcctgttatttggaagatttgctctttccttgattgtttcaattgtataagcctagtttgtattctttttctttgataacattagatacatttgaagattttccatgtatttttataagatcaataaaagcaaatttacttagtaaccccaaacctctattttgtaatttgtcagctcctatttttttttttataattctttgctcatcaatacaggcgtatagttttcttaaaggcatatttattttaactgtatgcagctgcgagtgctgttccctcagagtccagaaggaagtctaggatctcctagaattagggctacaagcagtttgagccatcttatgtgcgtgatgggcaccaaacgtggtcttccccgcagaacagtaagaacacttaattctgcatcaattcttcatccccaggtcactctgtattgttcattaactaaggactgacataagtttatgttttcattaaatgtgatagtataagaatctagcccaacatttctagcagtggcttattaaagtattcgaagtgacaaaataatttgaattcccattgccttgttactggtcatgtgtctttcctatagtccctacagtcaaggtcttcatagatataactgtatggggaaacgtgctggaggattcagatatttactgcctgcttccctgaactgaacccgggcagctctggaaggatatttagaactgattagataagagggttttatgtactggaggaggtagagatggttgcacagatttttctcctagccatacccactgatcttgaacaatggacacatgagttcaggtgtagtctactgacagttcctggtatattatcctgtgtggggctgggagtgtatagctcagtagtagaaggtttgccaaacaactgttaaggtggtgggttcaaatcctaccctgcataaataaaccaaaggaaaaccacactacttgtgttcttgtgtctcacatagtttcattgtgatatgtgatggatcctaagtgaggacatagacaaagggtagctgaacgcatgtccttacagttgcttctgtccctgtgacaaactgagcctctccttcttgtcatcactgttttaataatagtaacatgacctatagtaaagattttttagtattaaccatgttctagatatcattcctgatcctcctctctcagttgtcacgttaattttaagaaattgttttgttagtgtctttcacttgatgctgatctacccttgtcatggccacagtgctttcttcccgatatgaggcaaggaaagacaggagccagagtggagtcttgtaggtgtccatgttcatgagagtcaacacagttctgatcctgaggctgagatcagaactagtgtttgagctgtcattgtggaatcctccagaagcaggatgaaaagagttgctatggcaggcagcagagactggacttcattagggctgtgactttctcatcagctatttggttcttgaagacaggagtctggcacacagttggtatacattgttaatttcaggctcaaaggaacaagtggatgtttgactatttcaagagagtctacttaattcttcagaaattttgttcatctgtaatcagcctagagttttcatggaatttctgctaatacaaaatcttgtgtgatattaaaacagagctctggaactgtgaagatgttaacacatttcaaaatgtgttggtttgatttattgttttcttgttctgataaagataggggactactcttctctgtttagtgattaagtcacccgccacctttttctattttggtctttgtggtaatacatgtttcctggaaaattccccccccccccccgttctattaatacagtaaaagggggttacggccgtgactcaccccaggaaatcagccttcgtttgcttcctcaatctcacaaacagtgcagtccccatgcacaaaatcaacaacttctgcaaatgggttactttatagttcttaagaaagttctagaaaatacagtatttgtggtcgactgtgtgcttcctgtgatggtggggattgtacaaaagttcaggttttgcttctcagtgttcgtgaaatccttgccacgctagatcagtgatatggtctctggtaggagttctctgacctgctgatgttgagcaaacattccaggaacacatccttgcacagttacagctcagggcaggggcttcagcagttactgtctgggggtcagaatttcagtgcacatgaggtgtgtgccagcttagagtcccactgtcacccctctgctcactcggcaatgactggatggggccatccacacattaattctctccatgtgtcttggcgtctctgaggttttgctcagttctcctcatgaacttgggacctgctctaaggaagcttccattcccatgactgtgactgctattacacagttacctgtcatgtccaaggacttcagactgtgagctcatcctaaggatgtctagcctcagctgatgtggatcaaggctgcgtagagtaagcttagtcattttaattccatacgttgttcaaccccaattttgtctagaaattcattcttttaaaaacagaaatggagtttaaccatgtgttttctgtaggatttgtattttccactttgccttataatttatattcttccttagctgattttttaggtatctgactgtgaattttttctgaattataaatgtcttccttttgacattactcttcactgcctttctattttcctggtacagtatgggataaatagtagctgttcactgtttgagaaatgctaactatgtggttatttgaccagtgagtgaacttctctggatctctggtgtaggaaagggtagaggaacagttcctgcttattttgaaggctaggtattatatttaaaaactcttttaatagtgcctggtacttagtaagcacttactaaatgttatcataaataaatgatctttctgctacttataaagtagccacatagcatttccttctaggattttcttccagtcttttatgatggataaagaagagccatacagtctaggagttcctgtcagctttctttatataggaaaccagatgtaaatatgctgtttcagttacatacatctcatatttttatatgattgctgacaaaacattaagtaagaattatgctatcatattccctagatatcaattcatgctctcattaaagtcagacatttatctggtactgctgactgctgttcttacccgcagtaatgttaagtactgtcaccatttaatggtcttgcctgacctttgggcattagtgccaatcctttcttcattctgtccatgaaaacaacaacttagacatcccattccttcctccctgtgtcttcttctagcttagaaacctttgtttaatagagggcttgaaaacttgctgcaacagaaaaagattgtaataagaaattctttcttccatccttccaagtcgaagcatgtgtttatatgccttttcatatgtcacacatttaggtgcatatacttttatatgtgtaattttcagaattttcctgttatacgttgaacagttgcctttgtgattgctgctgcaaagaactcagagggttttatttttttttcctttcatgatttcaaccttgagagtcagcagtcagtgtgctctggcacagggcatgttgttttgcatttatcagatgatactttgcatgcccagaggggatcagatttggaagatgcatgcttaagtttttaaatataagtaactctacagtgggtttgtgtttgtcagcccagtaaatctttatagaactttgcattgcagttgtctctgtgtgttgataactgttccctggagagtacagcatcagaattgaatcctataactccaatccctaagtctactgctgcacatttcccacagtacctaacggtatgtggggaactgctcactgtcctgtcccgtgtcatatgccatgtgggcagccagtgcacacagatattctctatattcagctttaaccgccacaagtcactttttcatgtaataagtgtaccacaatgcccagcgggttgtagatgcttagtagttgctggaagattattaagttacccagatataaaagtggcaaatggcttagttacctgggtgtggaaacgtctggtgtggttctagtgggagctttctaagtgtcttagtttaagctgatgacatagtaaagaggatcatacctgctctggtcactgatacagagagcctacattgcccttcaagacaaggcatctgtcacctaaaagcccgatactttcccatggcagtctaaaaggtgacagattctaggcgatgtcttttgggaagaacagacagacaccgaggatgctgctcttctgaacagcttttgtggttaggagtgagactaggaagtgactggatcagtgtggaagcctcactgggtcccaggatggagagacttaggagtgctgttgtccagcctgagagagtggatgtattgtcacatgtgatgctgatttcccctttctatcagtaactgtgtctgcagcaccttcttcccactgtctataccaccacccctcattactccttttgcttgctaaaatttgaatacttggtaatgatttgtaaaaattacattccatgtgataatgtatcatatcagcaacctgggcaaagagatatcctctaaaatccgtagcatgaatctgagtgagatgagacctcacctttccctgaaagaagtttgtttgacatttgtttgttcattgtgttgtgtgcgcctcagttcattcttttattttattttatctaaggaagttatacctattgatatgtcagtgaactatgtgtatgcctttcctttgaggccagaagtggttgttggatattttgggactagagttacaactagagctgtaagctgccatttgttttctggggatagaacatggggttttagaaagaatggcctgcgttcttaaccactgagccatctggaaagatcctgtgtgtctatgttgtaaaggaatttctgaacttaatccccgcacagtttcagtgcaagccctttgttgtagtaactgttccagaaggatgcctggcgttgtgtcctgaggatgctcaccagcttagatcagggagtagagcagcctgggaaagctgatggcgttcttcctgactctagagtattcttgattaagaatttgatggaggagccaattcttgtggtatactcctacaatctcaggacctgggaggtcaagccaggaaagagctacaaatttgatgagtctgtgtttattttttttaaagatgtttctagatgattaaaggtgtcataggtctacagtttgtttttttgtttcaaggatagagacagacagaaaaaaaccattgagagaatatttgtgaactttccttccagattcagttttccatcattttgacttattagtatatacatagagaaacacatcaaattttccagaatggagagggactctataaactctgacttcatttagttgcgtatttagccccatctttagcaaaagtgaccattcctgtcagtgactgcatgctgtacatccaaagtgaacgtgttatacattacagttccaactgaatcggtgtaatggagtacaagtgaatgcagccctggcctacctctgaggcctgtctctctctttggcagactctgtgtcctttcttgtaaaaacctatccaacttaagattctccatttaacagaaaatcttaacctttatttgtttcttttctaacagtatattagggaaagggtagttgtgaatttgaaatgctgaacacatttgaaagcctgtgatcatatcagtctggatgagagaaattggtggggtgcgttggatatcttacatccggtcctccttatttttggttttgacttccaaagcttcagagctatgctttctgaccttcctagttagcagtgctgaatctcagcattgtgtcaatcctcctcagctactaggatgtaaagcagtgttgtgtcatagctctaacatgcacaggataggaaggagctgcaatccagtcacaatttttctcactcaacttcactttaccccgattcattaacaaagcactttgcctctttcctccttttccggggcacagaaggaaatggatcacaccagaacgtctaatcagtttgttcagcaggggtggcatgctcctcatttcaccagcgtgtgtacaatactttaagcagagatgcatcattttcaaacctaccttgagtctccctcatacctgcttatagtctttggcttttctcccctcactgaaatattccaatctggaaattttatcgttggactctagatctttctccctttattttgtagagtcaaactacataatttcaatactgtgatctacaagcatggtctagttttgttctgcataaccttcttatggttgtgttatatccttcacactataaatgatttattgtgtgtatacctttgttcctattcatatatatgttgaaaggacacagagagcaaacagctttgcgaccttagccactcattgaacatctaaatgggaaaataaagttatttcttgtactttgaatataatttaaatagggggaaatgtctattataatctgtttagcatgtactcaggattttaagaaaaaaataaaagatgcaggccttagttcaataaaggaaagaatcatgcatccatccattcaaataatgtttaggagtctgccacgtgccaagcactatctttggtttgtaaataagtaaggctcaaggtccttgacctccttggtcttctaccctttaaagaaacaaaggcacacagatacagataaagcactccccgtctcttcctctctctctttacctgctccctggtttcagagtcgtatatatcagttagttgaaagagatgaagcaccctggccatttgtgctagagaacatatgtaatgacttgctaccagttatctccctgcaagccttctgtcacaatcaagtgtttttctccttcctgttccattgggcagcgatggggacattttcatcccttgccactcagggctttttctttctagtagaaacaactgtgcacacaaaagcacatcctgtgtgcatgcgttgtgcttactactgctatgaaagaaagcatcatgcatacctcactcagtctgggcccatgctgcaatgagtggaaatggcgccgagtactcaggtgggcactgtccatcatttgagctgaatgtgcaggaccagcttcatttggatgcttagtcccacgtggcccctgcgaaccagtgaaagtagcaagtggcttttagtttcccccaaccatgtctctttctgctgccgcccaggttgtgccggtgagactgcaagggcaagatgggatttgaactgttgctcatgttcagtttagttttcttttgaaaagcaatattatagtctgtggctatgggtgacctcatctccctttagcttctgtgtggttggtttttataatgctatactatataaaagctcttttgacttttcattttgttactgtttccattttaaattttcatttaattaaaaacaatttagtccctctctgcctttctcagctcatttcctgagtttcctttctttgttttgtactggcagattgaaacactttctctcccctatgtttccccagactgctgctgttgctgcttctccttctgcaggcctggtctcagcatctaccttgtttctaacctcttaggctgataatagctttgtcttcaacagcaatgagaagactgagaaggcagggagtgattttgtttgtctgtttgtttgcttttgcttttttttctaggttctttccaagccccatgcttgctttccagctttctagaaatgccccactttccctgcacaacacctgctgttggccatttgtcatccttgtcttccagagagcaggtgctgaggactccagggctggaaggaagagcttccatctctcccttggtggctgtagccaaccaataggctctctgtacctaatgtgaatctgccttcaccagagagcactgcaaacgccccagttgcaccgagtcattcaacactgatacgtgatgcatggaaacttagaatctcagcggatccaccacggcacttgcttagctaagcttggatggaacaagcagccctcacatatctgatcattttgctgaacagaggatgtgcacatcatcaggtcttttaaacatttcccatgtcagtcgtgaagtcagagtcgagaaacatgtgattttatgaaacaacataagatgtgaagcaaaaatgacctctctgggcacccatgtccagaggttggaaacatgaagggcaatgctgccactcctgtatgcacagtgttgaattggctccaccttcttcctctgacgtagagaggggtcttgacattgaatgacacaggagtgtagattggggctgaggaaatcctcagaagacctaacattatgaaaaggctgggtttataagctgttaagagtaccacagtgagtgtcaagagattactttgggggcccaggacttatggtagtgccggctgcaagttgactctatttatgtggtttggaaacatggacccactctcttcttttgagcattatttctcgttctttttaccttggaggcagacctgaaagggagtcagtcaggtgttgtaggcggggctgatggggctgaaggcagctctgcagtgctgagaggctcaccttgtttccttgtgtgtgtgagccctctgctcagtcccctggcagagtttatatacacccccttagcactgtggtctctgttaggttttaaccatcttctgttgcctcatcctcactctttattttggtttcttttcttctccaaggtgtttgtgaatgcctttctgtatgcagggctctttagaaatacatagagctgtttaaagtaacataataattgtttatttgccatatcctgcattttcagttctcttttatatcttttatatgtgtacaaccaattctaagaaccttctgtttgatagataggcccaatgaggtacgagactgtaagctatttgaggggctgtgttgggattcagaggcaagcagccattttctttggctgctttgaccttttgtgctcacgcaccttatttacacgctgccagcctggacctgcccatgcctcactttgtacacccagcttatttagcagagactgtatttgctttcaatagaataatacatgtattatttaatgataacagatagaacataacattttgtgaggatttataatatactctttgagctagatctaggatatgaatattatctggataatgtgaaaacattaatataagcttgcaaactgatcaaatatgtacaagatatgtttagacacagataatacttaatgaacacagactggtaagaagcccagcagggcccctagttcactcactgtccacacaacaggagccactgctctcctctccctaatgagtttaaacaggcatattaatcggcttctgtctgcatgactccagccttgtaatgatctatgcacattgcagactctctagaggtttactgctcccaacaattcagagtatgacatcgtatatgctctctgtatctcatgattttatttccatagataaaactcaatgtgatttaagcatgtctttctaactttttggtcttatatacatgactggcttgagcatctttgtacaatatccttcgggactcgtaggcttagggtgtggtcggaagctgtatagttagtcattttgtgcctatctagtcagttttagcatttctgtcaagatgttttacatgtaggttatttcagggataatgtatcctgctgaagtgtgcttgtcttgttttgccctggcatcccaacacatggtaccatgcagtattgtagttcttgctgatacggtggggagaatggtagttcctagttctggcttctgtttctatatgagaaacgatgactcaatgtctcacaatgatgtggaggaaatgtctcatgaggagggcaaagcatctatttctagtcaaatagctgtctaaaatcatgattgcagaggattctgtgacatttcagcagatcttggggctagaaaccaattactttgacagtgatgccttggccaggacaggtcactttggtgacagtcttgaaggatccttctttaatcatctaattacttttgtcttagtatttactgtgtgacaatggggacatggttgtaagcaaaatgaatatggctttggttttatgaaccctttactgtagtcgggaacattggtgatcaaatactcatggaagcatgtgattgtagaacacaagcattgccacacagagacaagagaggaactatagtgtctggtactggtgctcgcttctgtgcatgcctgtttgatgaatatgtgtgctaagagtgttgtaggttgtaggttgggataatagtaatggattggtcagggttctctcaaggaaaagaacaaattgattaaatagataaatatattcatgtacacataaattacataataacacatatatgtagaaagacaattgtgcatatatattaattaaaggggtcaattataaggatataacctttgtattctaccttgtaggtctcacattggataggcctagaatcctagagatgctcaggccatgaggctaaatgtctcagcactgccagtcagagttaacagtccagaagattcctggagagccattggtcttcagcctgtgtttgaatcctgaggaacttggttctaatattggtgattgatgccacaccatgatagcttcaaagcgatggaatcatgttagatattgtgctagaaagctgagcagatgttccctgtttgtgttgagctctaaccagtgaactaggtcaacactgtccatggagtttggcaaatatttgatgtccattccctatggcatggagatcttatcttgttctgtgacctcccctttctaagtatgccattttctcatatctaaggtatattacttcaagaatcgggtttttatccccagggaaagttagaaaatacaaaataaacaaataaaaatcatcttactgtctttcagtaagtgggtatcagtataactactaacctatcttgttttttaaactaatagcaagtcattagtctactagacattgcctagataatgctcatctaccaagaggggcagatctacatttcgctctgattggttaaccaggatatgcagccatgctagaggtccttgttcagtattagttcttccacatcccaactcctcatcgtgttctttaatcctagaaagtaatttctggcactttccctcgactgttcagaaccctggattactgctgtacatcaatgatagtacactggcaatagttgtgtgagtgtattggtctgaacctatgagctgtctatggaacaccagagtctgtatttttagttcatttccttaggcaaatacaaacattgcacagttacctcgggcatacacaagctagactgtcagcatgagcacaaggaacctattagtttaacatgtaccaggtccctccttaagctttggatgagaaaatcgaaaggggacatttataagctaagcgccacatgtgtgtcggattgagtatagattacaaaccattcaacctatatcaaatactgaacttcggctaaggctggcttgaactctgagagataaagtccatacagtttatctcgcctgtgccattttaactcagaattgtgttgtatcttaagttctggatgctggggcttctttcatgacttccaaaagcacatacttttctggtttttggttgtttttttttttttaacaatttgccatggacaattttaaaaactgttgtaacaattattttaatgtttctttccacatatgtcatcatcttcagcaaggattggctcatgtacttctttgtactgctgttcctcctgtcgcatgtagtccctctctcttctttccacagccttccttccctttgatggtcacttcatctcctctgtacctcagtccttccctccggaattgtctcagagataatctcaaatatcacagaatacaatcagtgctgtaaaactgaaacttttgtaggtgtgtcaaaagcacttctctcagccataaataatgttaggtgaccatttttgcagggtgtttattgatcttgtggcttttgccttggggcatggtgtgggaaagtttaagagtaaaaattttaattctgagtgacttctctggttgggtgaagtgacagactggtctgtgtctattgtagctattatatatatttaaaatatttagtcaaatgaaccatattagcattagtgagtctattgtattgtcagtagagttctgctcttaattataaactattttaagatatagatagaagcacaggtatatatagccaatacttcattaaggttagtggtttctctgatttcctcagtctaggttataagattctgtgtggtaagcacagaaggtgtttgcttttaaccaaattacctagaaaatagagagggaggcagaagtttatattcttagaatgaggaaacccaagtgaggtgtttctaatatagaggcagagagcagacagacagtacatagcatagcatagcatagcatagcatagcatagcatagcatagcatagcattgattgctgtggtctcattacatcttcataaaagcttcctgagcaagggtgttctcagtgatccacttggggaagcaagaagagttaatgtgggtccccactttccctgctcacacggcgctgagtttcccaggcttttgtagaagtatgcttttagttcctcctgtgtcattgtgaccactttttgtaacaacttgactcatagcatcccagggaggcttgccattctttagggctgggaaggcatagtggggcagctcagcctgtggctgtgcatcatgggatacaggcctttccatgttgctgaccacgaggcgcacagaggtagaacataaccatgtcttccatcagtcaggtctcagttcctcacagctctatagcttcaaaatcccgataaagtgaagcaaagggttcaagaatgattctgtggagacatttcccactcagatgatggcaccatgataagggaaaaccttaaaatatttgtccaaagggcttatctgcctaacagaccaccggaaatgagatgacatttcccattaagcctgattctagatccttacacccagttgttcctaatagatccataaccctggcttacttgggtcctctgatcagatgcatgggtgttctgttgcatggatctccttgtaagctaaagagatccctggttatgtgtccctgttctgtattaggtgccagtttctcacggttctctctcatactcacgtctcctttgcttgtgtcaaggagctgctgctgaagagatgggtggcagtttcattgcagcagcttgatgaagtgactttctgcacacagagtgaattagttggcatgtcacaattctggctttattttcccttgtcccatgataggatttttttttttttaaaacaaacaattgcctaatcaggtaactcacatcttatccaaacagcattaactttgtgtgtgtgtgtgtgtgtctgtgtgtgtgtgtgagtgtgtgtgattctgttagcgtttttgaattttatgtattatgcgcatatatactagtgttacctttacatttggggtgtcttttaattttgctgtaatttgcaagtataatcaagttcatttcaatttgctttgaagttattaatctgttgatggaggttgaaggtctaagtggatttgaaatgacttcccgtgtgccatgtgctgactcagtagctcacactgcctctcttcctgtgtgttcactgtacgtctgttcccctcacacctgctatgcctgcataactcttaacctttccggttgcatttgccctgccttccctgcagtttctttactagtgaagagcctcactttctgctatgcctcactgtgctgggtccctgcctcctcgggggtattagtgtgttctgtggccctacctgtgttcagaatagagacactgctcctctgcccctgctgtttggtaatgcggactgtggaaccttaacatatggcctcatcagtaataaactcccctgagaagccatgtcagccacttgctccccagaatgtcctcatgaaacatccttggcagggtagcactaacactcggggctttctgtagcactgcccttttttttctaaataacaacaacacacaaaaacaaaacaaaacaaaacaaaacataaaacagtgtttccctgtgtaataattccctttcctagttcctggccctcacttgtgagtacctttaacccagtatctgagttgaggtgttgggaatatgtaaaacctgattattttccctattggcatctccttattcaaatgatgagaaatctgtgaatctgctcatgccttgggggtttcttctatatactctctgatactgaaattttgacaaaaaacgggttgagtttcatactttccaaacatgaattttgtccttggaaaatggaatgagtcatcttctttatgtagtagagataattccctgacatgtgatatgctagctgctagtcatgattttgagttttagtttatatctaatttatatgaattaacatgaagtagaatttacaattagttccatcgactctctgtgttttaggcgatgactcccatgctcatcgcatgctgggctgtttagaacatcccatttaaaacaaatttgtattgtccagtggcgatagaatggactccatagaggacagttagggaactggaggaaccagtcttcaggtgtgtcttactgctttctctaagcttagttcaaacaatattggcctgtattggtaatcaataagatactgagatactttgttttcaagatactttcgttttttgttttttgtttttttttttaacgtaggcaccaaaaaccaaaacaaaacagaaaactctgtaggataaatcctcgctggcacagaagatcaacacttagacttgttttataaccgagaggattaagagtacaacaccgcccaatccctagaatatcagagaaacaaaggccacaggtgtttgagagctttgtcaggagtgctgtttctagaaatgtgtccttctcatgtttatgcccctgctggcttgggatgagaagttgttgggaatcctagaatgttaagacccctgtcctcagaagatttctatatcatagcctcgttccaatccagtctgaggcatacgaacaaaagctttcctattaaaatgaagagatcaacaaagtaagtagatggtaaatgaatgacatcatttgtttgtttgtttgtttgtttgttatatagagtcagaagctgtggttgatacactctggtatttatttttgggagaacgattttgcctgatggtttgacagaaatgccaggacagcgtttctcccctttgggtggccagacagaagtgaaacctagttgactttcacttccaatttaccttgctttgatttccaatttattggcacccaggatctggtgtttgggtggtgaccaagatcagcgggtgagggttactatgagaaattccacagggaataagttggtgttgggtgcaaaaagctcatatgtcctatttgaggctgtgtgaaatgaactggatcctcccaatgaggtggccccagagatttaatcctctggggtgactgcattcacaagtcttttcaagagcctaagcaccataaaatacaaccacaaagccttccttccaaggaatgtgtgtatcggctcatgtcaagggctcttagcaggaaacaatgagcctaaagccataatctaataaacaaacagataatccagttcaggtttgtctaggtaatataatgtctctatcaaactagttcttgcacctttagctctattcagaaggaaagagttcttcgtgggaatatgtgtgttttcttagcagggggatgtgtgtttcccgtgaccgcatagcttgtttttctcttcttgctcagtcttgttgctcacggtgggaattttccatcttggtaatttggtattttccttggtttttattgtaaaggatggaaatgtgtacacctcaatttcaggtttcttgttgcaccacctccatctcagttgcctttggcctgggcagccagtactcgctcgtcttcatgcctttctacccaccaaacctttaggcaaccagcaagctcgaaggtgaagctgtttctatacaggaagttcacggattcctggggggaatttccaaaggtctggagtcctttatactcccctgtgacaactgagtggcacgtggaaaatactgtacgctgggagtctactttgaaaacaactactgaattgcttaatttccaatatggccatggggttttggtatgagggaggtcagtcattagcagcacgagttactgagttctctttgcctgatcttgcctagagaattatgtgttatggtaaatgctcaatgagtgccttcttgcagttaggctaactgccctgccataacatcgggctattttctggctactcaggttggaaacagtctgtctctttgctgttaattcgccctcacattttgagtcacggagtcataaaccattggtgttgaaagcgtctttaaaagctattaagcaagtgcctggcacttacaaagctttaatctgtatcacagtatttctcctcctcaccccgccttgaacatgtgcagttataggtagttttcactttctcaagccagtgactttctagttttctttcacggtcaagcatcaggcacttagcaaacgcagatacactgaagtgatatgttattgccaatgtttctgtgaaactctttgtaggttttccaaacaagcttaatattcccagctgtatcatcagggtagttcaggctcatattctgtattacctagtgtcagctgtaacatgtccaaagaagtaaatatggttatagggtggcttgctttttgtttttgttgttgcatgtatctgctagatatattctacctctcattccatttgttatcttctccttaaagtcacaaagtagctctctggtccctgattctggtgtggaccatcctatcctgggcagcatcagaatcctttggaggccttttctttttaaatcgatgcagtggtgtaaagaaaagcctcccacaggtagagtcaagaactggcttagctgaaaatctaattttgcttcctgaaatgcatttctcagcttaccatctaacatggattttccctaaatttggtagcaagattatggatcacaaggagaacagtgtgtggaagacaaaatagaatgttgaagtaatatctaaatttggaaagatatcctgaaatatgaaggctgtcttaggaagttctttaacttcagatgctctgtgtcatgacgggaagacacttacagtgccctgaggaacctgttccctcccagctttccagtgcctcctgcagcctcctccttcatggctcacggtggcatgtggaatatctggtaggaggattccaggtcctgattgctgcaacctgtgaataggttggctccatggcaaagggtcttcgtaagttaaacagagttcaggctgctaagcagctgagtattcacagtaattttccttagaagtcagtgaggggcaaataaaaatagtttggagtaatccatgatgagagaatgtccaaggagtgttggctttgaacatggaaaagaggccacataccaacgaatgagggccagttctcaaagctgggtaaggagaggcaatgtctctgcagacattcataacataaagcagctctagggatattttgggtttagtccactggtataaatgatggacttttgcttatgaaacaataagatcagaaacctatgttattttaaactctgaagcctatagaaacaatgggaagctaccagagactatggtacatggagatcatttgtttgcttatttcacctttttggaaaaggaaactttcaagctttactatgtcttatttcaacataatttcatctgaaaggaacatacaatcccctgacaaatagtaggcagaactagtgtgtttattcagtgtgtgtgcagaatgcctgaactttttgataagggtacctttactgaatctaaattttcttatgtgtaaagtaagttgctgggcaagatcaaggtcagtaagttttctgtaagtcctaactgtcactgtagataggcttttagggaagtgaggtgttttctctacttagctttgacattggaatgggaaagcagccacgtataataagtaattaaatggttgtggctgtgttccaataaagctttatttgtaaaagcagaaagtgggcatttgtccatttagaaattgtttatgaacctttgggcttttgaaccttcttatgctattcaaatttccttctaacctgattatttggtaggtttataatgttgtgtattgtccattaagctgaaaaagtgtcagtaggacttaaatagagactcaagtgtgtttctttgtaagaatccctgtagtatttgcagacttaagtgccaggacgggaactgctaccatgtccttggcaaacggacctggaacaaatgctcttaaggatgagacacagggagacccttgcatgccaaggctgagctcactcatcttgagactcgaaggactgcagctactgttggaagaatacacgggtgcaataaatccagtgtggtaaggaatgatagaccttccgaggccactggccaaatgaagtgaaaggagggaaggaaggaatccttcactcagctaaattatgtctttgggctgctcagacaagtccactaaattagcaaggtgcttgagcttcagcccagaatacgtcattggattgtgctgtttgtattgtcttccatcacaggacctcctctgagggagaaaggtgaagtaaatgaaatgcaagcagtggctgactccctaaagacaaaacttgctttttccagagaacttaaatattgaagtcttaattggacatgacaaatcttgattcttcgatgaataaaatccaatagattttggacttttaaaagcttttctactggttcaggagttgaccatgtttatcatgctggagtgtggtttttagagcagggcttgaccatgttcagatgttggagtgtggtttagagaacaacatggggagaaagagccagttaagcaaaagaaattgggttgcgactgtttgtttgatcaccagattgtggttgttgttttgacttggctgatgtatttgattttgagggtggaagtgaactcttctatgagtatgttagatttccctgttgtgtcttgaaaattgtttaagaacagattgtccttaaggaaacaggttagcaagtaatacatagcagagccctggtaaaaacagagtttaattgttttagaagaattcactggtggacattttaaggggaaccaagtataccagtggtgaggacttcctctgccatctctagtcatatgtttttcttttctgtccctttgcctttgcccttgagtccttagaagcacagtatactacgagctatatattgtgcttatttacttaattacatttttatgcttgattttctaaatatttgtgaagaatggtctgatcattaggttacattaaaaatcacctcatagtaaaaaataatgtatatttatagaggacatcgatgtttaaagacagtttaaaatttatgtactttcgttggtaaaatccaaggcagtagctaaggcatgtgctgttattttcactttgcaaaggagtgtagacatagaattccattattttctcaagtgcctgtagctagttagtgctttgtctgtgacctactctactattatagggccgtgtctgtactatgtctaagtcccccacacttgaacagggaaagggaactcccttttgtagagctgtctcacactgtcttcaactgagtcttgagttaagtttttgctttctctctcccatcctccctttccccaccttctccctttggatagaaccttgagttgcattcttattagaaagctacaaatggggcaggcagtttaggtttctttgctgtcttatatgggaaaaccatgtctctgtaaactttatctcaggaaaagcctaggactgctaagtcttctgtggaagttctcaattctcagataaggcttttcatagagaagctcctgcattctcccccacatcttaccctctgacctttcctcctgccttgtgtgtctgcccccacatgttcccactgattttgagacttttgtccgagcatttttttcctccaagttgtttaaggacagacttaggtggcagagattcaatttgcacaaaaccaatgcatctacacactcatcacatattttccagctcttcttgatctcagttgtatcagccattggaggagatgctgcgggaatggaatgtgtagctgacatgctaagtgccattaaagatgacatagtgtagtgaggtaaatgtctctctgtttttcatgcagtgcatatggtaatgttctagatatgttgtaggaagttagatgaaagtctttgtctcaggaagccaaggatatctgtttaggattgcaggtgctctgcatgttcaagaaaggcttgggcttctccatgaaaaaaacaaacaaaaaaaaaaaacaaaaaaaaaacaacaaaaaaaaaaacaaccaaccaaccaaccaaacaaacaaacaaacggtagataagacagtcctggtagagagggatgaatgagcctgtccctggcacctggaaacagagttgtgtaaatcgacagagtggcattcgactaagtaaagaaaagcaaaagttctcatcaaaatacagatgccagtcttaaaaaaaattctgtgtaaccaaattagccaaaatattcttaatgacacacacacacacacacacacatacacatacacacacacacacacacacacacacacacacacacacacacacacacacaaatagtgcctgtcttcaaaacttacttccaagctatatctacccaacaggaagctacaagcagaaaatctaacatagagaccaatggaacagaagaggtattacagcaggtactctgtgagtttatagccaaatgatgcttctcagaatcatgaagaacatccattggagcaaagacattgtcttcaggaaatggtggggggaaaatggatatttgtgtataaaaaaaacttggtgtctatttctcactaaaaattcattaaaaaaatcaaataaaattggatcaaagacctaaatatgcaacttaaactgtgaaacagctaaagaaatcatatggaaaacaattcaacacattggtgtaagtaaaggtatttttttctaatgaaacccccaaggcaaagtcaagaaaagtaaaacagaaaagaagagataatctcagaatcaagggcagcacaataaagaacagtaaatgaagtgaggagctagatagacaaccagaagagtgagaagcactgcagccaggtatctgggaagcgcttcatagctaggatacataagacctcaaaagaaagataggactttatccctaaaaacatggaaaatgacttaactaaatatttatcaaaaaagatgagcaaatagtcaacaaatatatagaatactttcaacctcactcactactagggaagtacatgtcaaagcaaccgtgagctactatgtcacctattaaaatagcgatgagagaggagcagtaatgggtgatagtgagcttgcagcaaagctcaacttttccagtgtgttgctggcaatgcatattcatacacacacctgagcaagaccttgttgtggcttcctcaagctaaaaaaatgacccggagatctcattagtgagtatattaccacagaaatagttacatcaagaagatatctaaactcacatgtttattataccatattaacagctttcaatatatgaacacaatgaaagtgtctgtcagtgtgagaatggatggaaatgcacagtgcatgaataggtatgtaaagaataaaacatttgcagcaatatgattggaggatattctcagcaaagatacaataatgcacatacatgcttttactcatttgtaacaactaaaataaagtactctcatagaaaatgcagtggaatgggctcatctgattatagaaagggtcctgtggtgaggagaagctgagagatgaggggcataaaagtataggtaagatgaagacggatttaccacttcatagcatagagacaaagtctacagtgatctctggtctctgatctatttcaaaataatttggtccaagacttcttatttccttattataggaaaggttttggtttgaagaagtggaaaggataattaccctgatttcatcctttcatatttatatacatatgcaagattatcatgtacctatagacatataataacatgggttattctgagcgtctgggctaatatccacttatcagtgagtgcatatcatgtgtgttctttcatgattaggttacctcacttaggatgatgtcctccagatccatccatttgtctaagaatttcataaaatcattgttttaatagctgtgtagtactccatcatttaaatgtaacatattttctgtatccattcctctattgagggacatctgggttctttccagcttctggctattataaataatgttgctatgtacatagtggagcatgtgtccttattacaagttggagcatcatctagatacatgcccaggagtggtattgctgaatcttccagtagtactatgtctcattttctgaggaatggccaaactgattaccagagtggttgtaccagcttgtaatcccaccagcaatggaggattgtcagtttgcaaaacacatgaaactaaagaataaggaagaccaaaatgtggatacttcgatcctttttagaaggaggaacaaaataaccatggaagaagttacagagacaaagttcggagcagagactgaaggagtgaccatccagagactgccccacctggcgatccatcccataaacaaccaccaaacctaaggactattgaggatgccagtaatagcttgctgacaggagcctgatgtagctgtctcctgagaggctatggtgatgcctgacaaatacagaagtgatactcacagccatccattggacggagcacagggtccccagtgaaagagctagagaaagtacccaaggagctgaaggggtttgcagcccccttggaggaacaacaacaatatgaaccaatcagtaccccaaagctccctgggattaaaccactaaaaaaaagaaatatctggctgaaggtcactccttcaggtgggtctcatggctctacttgcatatgtagcagaggatggcctaccttggtcctgtgaaggtcctatgccccagtatgggggaatgccagggcctagaagtgggagtgggtgggttgtggagcagggggagtagggaagagagtaggggatttttggaggggaaactgggatgaggataacatttgaaatgtaaataaagataatatctaataaaaaaaattcttatttgatgttactgctaagtctacccttctggcatgtggctttgcccatagttgctactcaagtatcatgtatttaaaataaaataaaaaaaaatatatatctcaaacaaagacacccccccccaaaaaaaaaaaaaaaaccaaagcaattacatgggttagagacgctgtttgcatccaaaagatattaattgatcagtgtatctggggtggtaggactataacccaagtttgtcatttttctctctattcttaaagaaggttcatctagctggagagtttcttctttccagaatatgaacctatcaaatctctgggatctccaaacaaggcttgtctcgagcttccaatattcctctaaactccagcttgatggccaggggatgtgctggttgccagtatgaggcttgtttctgcactgtctgttttatccattagaacatatatgctttcccttggccaacaccacattggttacattaccatagtcttgcacaatcttgtgaaatcagggagcgcagtcctcctgccttgccctcctttttaaagatggtttggttatgcttatggggtggagtgtcagggtgttttcagtttgacaactccatagatagtgctttgaaaatactagcttgggaaaaatggaaaccacttagagaccatgccttttgtctaaatatgagataactacattaagaatactgtcttggtagcagtagaggtgaagaatagtgaatgaagttttcaaaagagggtaatttgatgtggcttccttgtattcagagcagatggctggaacaaagaagataggcatttttcagagtgtttgatgagaggaaatggcaatggagtaaacagaaagacagaggacatggaatgaggccagcaggtctgcggctaacatagctaagtctggtttgttgagtcctgggctgtaaatccagtctgtggtactcagctgatcactgagtacatggaacatacatggggcaggatcattgagttccatgatagcatcagagtcagtgctgcctggaagtggcatattcacttagtttcctttttctggtacccagttatggttaccatggcggcagtgatgcaagcagaggaaagtggttgcggaaagtggcaaaaatgacctggttaaagacagtttcgggaaccttctgcagcctagtgaggcttacagaaaccctgctggatggttgttgacttgtgtttgattttgaagcgactgttcttaccatggttggaaatcctttgcctccatctcgctgagcctaatgttcctgttctccagctgagagagactaattcaccaccttgtgttgtaaacactcactcattttaactgattacacctccaatgattctcaaatcactaaaattactaattgctattccttacacatcaaagagtgaatcctgaataattaaccccaaataaaattagatgaattggcccttttaattagagtccctgctgctgtttgttctgagcttccttttcttactgttaagagacttttagaatgattaaaactgtttaaggcttaaacagccagtgaccttttaatacaatataaatccatgaaagcaatatttcagctagcaggtggtgaagtaaatttttagagcaagtacctgtcagctccagtattcctgtgggggtaaatgcatgccaaaaaacaaccaccttgaaatgaaatgagtgtctctatttgattatttttatagcatttatgcatttgctaagcttcaggcttgatgaaataaatggcagggttgaaggagagtgagtaatggctggcatcattttatataaatagtaacgagaatttctcagcaagaagaacttcaagtgcgtagaagatgaagactggagaaattgcagaaggctcctaggcacgcagccatttatgtctggatttcctgaaaaagaggaagagacagcagcatggagaagtggagtgctgtgggacttctgggtcgtggttatggacatggattcccagcctttccctgctgcattcagactgcagatctttcccgtgttcctttcttctccatggaccccgggttgttctttttcagccttcaagagttgtaagaggggccagttcttcaaaactccccagatatctcaattcttcacctcaaatctgctctggagccttctaaactctgtcctatgctttgagctaaggagattctgagtcagaatatatattctacacaatttgactacttgtagccagattttctacactagaaggaaagtctctataacctgatgtgattgggttaatttaagtacttttttctttataatttaaaagtaaactttagcttcccatggggaaacaattgcaggttttacagaaacactgacaaactaatttcaaggactctttttttttttaaacttaacctacccaaatatttgcaacttgtatgatcagagtaggtctacataacacaaggaattaaccaatgcaacttaataacttatgtagaattttttcagatgtgatcaggtgccatcttaatgtgtgtcttttgatctcaatttatgttgagaattggcttttgtccaatgtttcttcctatttctaatctcagataatttttcatggtgatcagtgatgcttacctggaaataagactcagagtctcctaggatactttgtaaaatactttttttgctccctaagcaaaggttctggctttagaattacagagtagcaccttctatattctatgtggtagatggcaatatgtattggttattcttcattaatgtattcttattcttagaaccaaatcagtaacatatgtatatgtgtgtattagttagtttctatttttctataaaacatcatgacccaaagcactctgggaatgaaaggtttgtttcatttatacctctatacaaagtccatcagtgaaggaagtcagggcaaacactgaagctggttagaatcaacctggaggcagaactgctttcgggctctgtcagggagctatgtcctgctttgttccttccagctccctcagtctgctctcttatgtgccccatgtacctcaggacaaccttcccagggacaacatctcacacagtgggctcagctctgctctccctgtcatgaatccatcaagaaatagctctacagccaggctgataggccaattttattatcacattttctttttaccagttgtggttccctcttcctgggttactctggcttctgtcgagctgacaaaaacaaacaataaacaaaaacaaaccccaaaccgccagacagcacaacatgtaaacaagcatgcctgtgggtatggagggacaggtagaaaagagatgaagaacctgaagagaggaggatggcaagaaccgtgtgcaggcaaataacaggacttacaaagagggcggaaagaggagtggtcctctactcctaagtctaccagcgagttttccttttgatggcaatatgtgtgtaaaaatagagtaaatagtgaaattataagatccggtgcaaagctttgcagtgtccttctggaatggctgcttttactgaataggacttcattgacctgtctgctctttgggtaaaacgtgattggtggtgctttttattcactccctttcatacagtaaagtttaaaatacaaaattaaataatgaagtgtgaagtcagattgcttccacatctggagcactgatgtttcggtgaaattcctagaagatcagtagaactttctggatactcattgatcatgggtgtttttgcaagtctagtctcagatctttgattattgaagaaaaatccagagcaaatgcagatgtttgcaacccttctggaggataaaataccctcagaacagaaaataatttagggttccggacttgccatcatacttggcagacagactcggtaatttaaattgtaaacaatcagaaggaagttaagcaacaagagcaacagcagcagtaaaaacagaaccgacagggccattaaaactgaagtcctctgctgcttggtcaccaggaccataacccctggaccactcatgttagtctgctaggtacaagttttgctataccttacattaataattagaatgggcaaaacttgactatagacaatcacattatttcacagttcacttgagtttatattaaatatgtatgtacaatttctacattcactatagggagtatgcagtaaaaaataagctcatgataaattattcaaaaaacaggatgtagggctgcagctatctcctacctggcccagttggggaaaaccaatagataggtagtaaaactgggagcagaatttgtgcagttgtggttctcagtacctggtcattgttggtgaggatggcaaatacaggatcaacagagctacaactctcttcgttacccatggatgcactgtgtggaggacccgctgtcgtgcaggcttcatgctgtccttgaagagattctgcctggcatggccactactggtcatcttcaaatgggtgggatagttcggcaagattcattcagcacagtaatattcacttgccagtttctgagttataaattaagatttttcttgttgcattattgtttttgtcttttgatgttgggttgatttttatccataacgactttcaaatttttatttcgtcttttcacactgagaatgttcacgttttagtattggggctgagggtgtctcagtaactggtagaagactaacacatccaattcaacctgctgtcctgtttacttttattgttaatgttcatggacatggtggctgtttggatcgcagttgctctgtttttgtgagacaggaagcacctgggacatttgtgagtgcatgcgactctagtctacttctcagaagcatgctcttcttcaccgtgtggatcgtgtggaatctgttctgtgttttctcctgagaactggaatctttacagcacggtgctatgtgatagagatgtgggatatgctccatcagccatggtacagcagggtctacctctgggtggagaggttatctgtgagtttaggaagagttctgatgaagttagtgtagtcccagaagttcagtattagctaaatatggagagagactgtccaatttaaaagtggggagacgtcatctttttcaaagataataaatcttcttgctttcaatccgaggatctcaaagagcattttgagctgagttatttagaaagatgcccgcacattacattttagcttgggtaaatatagggatgcattaaaattaaactctggctttgaggagattctgcgattcatttcaaagtatcttccttctgattcttaaaaatggcaaagttacagttcatatttattgcatagaattaaagataaacagagaaaagagaaagcagcgtttgttgtgccatgagctctgggtaacctctggcaacatctagccatgtagaaagcaccgtgctgcaagcacccttcggagcctggccttcgtctcctctacttggtaatctgctggttcttcctctcctgcccccagatattctgtgactcactcccttactccatttacatttttgcccaaatgccaccctggtgaggtatttctcaatcctgttctttaaagctgcaacaccctgctaccatcccagctattccccttccttcctctgccatttctcctcgtatgtattgctacttgacattcaactcatattatctgtttatttcttaatcattcttttttacctgctccagtgcaggttttacagggggcaacatttccatttgttttgtgcgtttacctgtttgtacctttatatggcagagcctagagaaatgactggtgcacagagggcactgagtaaatgatagatgacagaaacagaagacaccatcagctgggtggctctccggctttccagtgtgggagcaactgcagtcactgtgtaagcagtgctatactgaggagcattattcaattattgaatgtgactatttcgtaattaaaacctataagtacaattgagggtttcataccatttgccatattttgtaaagggacctgcctactaggatcacatacagctctttaccggcttattttcacatgatatttccagttggtggatggtgtttataaatcctcatatgatgatgttgaatgtgtatttttgatccatacatgtgtgagggaaagagcaaagcagggtaattcccatctctatcacctcagacacattttcattagttatcttaaccctagtgttttcttaaaaataacactgtctggtagagttctaagtacagtcccaattagtaatttagttagttaggtgaagaaaatgaagattgaaggatagaatattaatttttctaatatcttgccatgtttgtttacacgcccacattttagattgcccagatagcaactgaaagaactttagtcagtgtcacttatctccttattcatggtgaaggtaggttcttcaggagagggattggtgctattttcatgacaatgaagacaagacagccagcactagccatgaatggccttgagagtgaacattccccaatgagttctcacatagggagaacatgaattcaggctctgcatattaagggttctgtgacactcagtctttgtgtgggtctctgactattcttaggtattgtgcacatgtcacatcctgtcccctctccatgtaacttcatttcacgagccaccacactctgtgaaccttgcaaaatctggtgtgttctgttatgtggcgttgagaagagtcttccaggctactagtatcctgccagacctagaaaccagacacggtattaagtctgaaagaagagattcaagaaaacactgatgtatatacttctttcttggactgagattcacgaaacataacggtccacacagggcactgagggaggaacatcacacgttcaagcccaaagatggagaccatgttacaaagaagagggagggagagagggaagaccgagattcacataggagtatctggatcgatgagcctggcaaactcccctagtcagttaaaagacaggagctggatagagtgaggaaaagcttcattacttagagaagccacacattcctagcttcagttttgaacagaggtgttcataagttgaaaaggctgagaaggtcattcaatggatgagaaaggtttattttcttggtctgtcacatcacagcactttctgatggtttcaaggcactgctcagctaaatatctgatgaagacataggctcctcataccagttcatttcatgggcttacccgattaggatgcccaccagctctctccttccattctcagatgcatgtgtggccactgtcactgtggcattcaaaggtgcttcctgtcccctaaagaacttaaaacaaatttaagagtctttggagagcgaaggagaaggatctaggtgcccccttttcccagtttgaagtaagagggaaagcattgatgattgcagcagtgaaaagagaagactttgttatattcttgcctccaagtctgctctctactggcacagttcagcttcttaaaggccgcttaccatttttcaccctctaaggaatttattgccatcatctctgtgataacatacattttgtaggtttatcacacatctatcattgagtatgtttttctattggatgttcatctatacatcagaattatggcatacagatgatgacaaagagttgtgcaggttcttcattccagttcctacagctagggcatttctcctccagagcatccccttccagtacctccccctttcgtgcccaccccattgctgcattagcatgcaagtcccagtataggatgtaggaaccgaaacctagatgattgaacttagtgaactgaacccttggttgtagtcagtggttgatggttaagaggttaacagctggcttcttaagaacctacatcatctttcttagaattaggttctttgttgttttcatattatttctttgttaaagaagtcagtttttctttctctttaatccttctgggattaccatcagcctgtgcatctctttaagttcttatagacaaacaggataaaggagaatatacttaggaggtatttcagagacagagttgtacctttatttttaaaattatttctgtgatattttggtttactcatatgcatgttatgggccttttgagtcaccctatatgatagggataccaagagttcaggcaggtttgagaatgtctgatggtctgataatttgaaatgccacatagaatctggtcaattacacattcccctccatactgcgttatagagggtgggagaagacagagtgattgctagaatctaaacttaggttgtgaacaaccacctagtcatggcttcatggctcaataccttgtgaattaatttttttcattcactctgttttaaggtagaagaggactctgttgtagtgcattttccttcagagttaatgaatactttccatgagctgtgtagccaccccagcatttctccattttagctgcatgtggagtcccctagatcaaagaaacactgatgccacacatttattccaatccccaggattctcatccaatcaaatccagaggaggtagtttggacagccatcggtttgatggctttcttacagattccagtgtgtggacaagggatagtgaatggatagtttcaaattataatgctaaaatggtaaggaaagacttcgagacaaaagaaatccctatacaacaggagtttggaacctttcaaatcctggggttctccaaaggatggaaggtactttgccgaactcagtgaaacttgaactatgttccaggagccaatgccactgaagttacctaggctttttagaagcacaaatcattggtccttccttagaactactacattaaacgtctttggaagtgccagccagaggtatgaattttataactcctctctgaaatcctgatggattgtgaacatggaccagcgtttgagcaaggttatatcatgacttgggggtgggggtgatgatagcctggtaaaactgaatggctctagagacactgtccttggctgttgtggcaggggttagatctgacagctcatagctactcctcccagtgtagcaacaccaccaggtgtttcagagcccaataggctaccatcatttgcaggatacacctttgcagttttagactttctttcctctgagatacccaagttgtcacatttttatattattcaaaagttaataatttgcttatggaatctgattcctatagcttggtgccatggtgacaggcgaggaagaagcacttacatgtaagggatacttctaaatgaaacatcaaaactacatttttaaagggagaacaaactgccttttaaaatggtaaaaaaaacaaaacaaaataaatccaatgtttttttctagtatatctgatttttaaacaattttaaatattttataatatagtcatacagatttgtatgtttgcttcccacatcggtggttacatatggtagtaacctgagccttcttgatgactgtgttgtacttagatatctagatcatctagtttctgttcaagtgtcccctaatctgttctctggccatttatacacacagtgaaagctgaactcgcaggctgtgtgtcagaccttgctagttttccttacgctcagtgttatttggagttttatgttatttgctatgttgtcgatgtttatattcaacatgacttgtgtgcacatattctcctgccttactacctggaatgggcttgctgtgcaggtcatactgtctaaggtgatgctagtacagcccccattttccctacctggatttaagctttattttatgttaacttccaaaaatgtgtcctcataaatgaacctattacccttacatgtatacaaatcttttcttcttctacttgattaggattttattagtgccatttatcaattctaataaaattcagtatccataattattattctaagaagtcctttgcctctgtttaatgtacttgacctctctatactaactttaaattatgaaatcaggtcttttatcttatgaaagctaaggctaacaattaatccaacattatctaagtaagggaaattttctatataactcaaacaagtgggtctaaaacattgacaataaattgccagccaatgtatcttttaaagagttctataacgtctcagacgtgttaacctctcatatgtgtccccttcctgtaggtgatcttctcccaccgccaccaccacctctagaggatcctggtaccatcccacctggtcccggacacttccctcctcctccaccactggatgaaggggctttcaaagtgcaggtaagagcagtgatagaagtcaggtttataagacaatgccaggaggcctggtttctgtgggtcataagcatttatccagagtatagaaggagctttgaaacacacagggacttagagttctttaatgggaaaggcccaagctacacgtgacagagtcctgttggcttacactttgaagtgctggactattttacctaccgatttcatttaaaaactgaagttgatttttttttcttttatgaaatactgtttgagaagtccactttttttttcttttcttttcttttctgttttttttttttgaataaagccaggcctttaaaaaatatcttttctttctacatttaagctatggattctatatgagaaagagtaatagttaagtctatgccttatcagtgtgagcgctgaatggacaacaacctgttttcactaaaataatactaagacgctgtagggccttctaggtgtcttcgacgaagaatgttatagttgtgtatcgttgatatgtaagcattgtgtcctggagaggacagattgcagagtaactaactccagctcagtgcacaagtgacaagagaagtatttttgctctgcagcaaggtgacctgtgaccagccactccacttaaggctgaagacttcattcaggattgaaacattataacatcatagacattgccattcttagataagataatattaatatagatacactggagacaacaatcaagaactggtctttctctaaatttctcgaaatgctgattgtcagatgaggtagcagagtgtctggcacttgcttctctcagtgaggcatcagcatcttgtgagttacaacacaaaccagataccttgtgttaatgttggtgtctggtgatgtctgtgtgctttattctgttgttgtttttgcctttgtatatgtccccagcgtcccatatggaatgtgagggaggagaagctgtaaaggagaatggcctaggctctcatctgtttacttctttcttttaaagtttaggttgggagagcaaagcagaaattattcatttatttcccaaatagtctttgttcctatgcagatgttatttgagcactggaaatcctataatacaaacagcaaacatagattatgtgcgatggaacttccatgtaaatagagtacagtcattgcacccctggctggggtgtgtgccaggcgggcaggcaggcacagggtggcttttaagagtaacttggtaagtatagcatcatcaggacagtgccactcaacaaaggcttacaggagaaaagacattatgagccagatgcattcctgaagaagtatgttttcatgaggtttggccatgttttaataaactatttttgttgtctgcttttatatgccttgttttgtgttgtggtatgtcttcctatattggttaatgggcataattttaaaattctcctctgttttcattcctggattcttactaagtctgttgtggaatattttgaatatttgccttgccgaggtctgaaggagttgagaactaagttctaagttagtgattgtgggtagatccgtgagtgctggtgatgctcacaaataaaaagaaggaaaccacaccttaaaacatcacagcacaccaatgcctctgaaaattctggtagtgatagctgggtgatagtttgatattcctgccaatattgtgcaaagcaactcatagcaatgataatattaagatcaatattgatagaatatgaagctgataataataaagttgacatagatactaggtgaagttacaatcacaataacagtaaagtcttgtccatggattctatttaaatgccatccaacccaaggacagagtgtttttatattgattgctccttgctttactttggtctttgttgcataattttcattgtgaatatcttttatatcatttaaaagctgtatttcagtttatgcttttgtagggactacgaatgtatcttctttcttgattactgtttcagagagttggcttttaacataaataacctttatatgtagattttatatcatgaaatttaattgaatctatttattaattcaatatgatttctacagttttcgggttgtctctgtgtgtgataaccttgtgtctgaaacagggacaattcatcttccttctttcccagtctagaccctctttaattcttggttttgcctgattcctctggtagggcttgtagttctgtggtgaatggcgttagtgaaagtggcttccttgtgcggttcacagggctttcatgaaaatgacaaaaagtctctttctctgaggactttgttctgaaaatgtactcaagccatggctttgtttttgaagaggaaggaaataaacaagaagcctgttgccatgttggcttgtattctctgtaaaacagaagggatgaggataaaaaataaagcagtgtttgccaagtggaaaaggacaaatctggtagggagagggtgttgtttttgaggttcttcctatgacattcttggtaacttagaaatgatgccttggccactcttgggccatagtgagttggacttgacagtggttgaccctgctcctactgtacagcagctccctttagacagagctcagggtgcctcagtctgatcactgggaacaattttgcacatttttttctctcagctctggtaaaacctcattgtgccaattccaaatccaaactggtaaatgtgtgttttgtgtagaagtctgtttatatttccagccagactttcagcctagagccagaagactgcctactaacttggacttttgcaaggctgaaacataccacctccatgtcattgactccaacttgatattcagacttctagataatagcaccctctgaaggaatcaattcccaaccctctttggaaatggggagactgaggcctaaagagatatgtgtagagatggtacttctgatagaactctcatcaggaagtctctcctcctggccataaacccccaccccccaccccaagttgattgttttgtatgcttgtcttagccctctctgtagctagcttaaggctccatgatggaactgctaaaaacaggttctgttggagttttgcttgggtctttattttgataaatgctttatatatttttgtacaaaagcaaatatttagtgtaaagaattacctttcttttgaaaatgcacatttttatagtagagatgaatctttgaagacaaatgagagatttggttttcttttccagaataaatttaacttttatgcctataaagtttgacctgaccccttgttagtcccttcattcatttgtcattcctcattcaaaggaaactgaatacactccataagtagacatgttatgctgtagggatgttagccttaggactgggctttctcagtagagtgatccaagtgttaagtctgtgacactatcttatcactttgctctaattgggtgtcaaagtttgcaatttgtcttttggtgagcctcatgaacaggtgcacagtattgcttatcatttttatgagaggacagaatatctttccttaggtcttttgaagtatgttttaaagtgtcttatattcctagcaattggacttatattttttaggtttttctattgtttcaatcagtagagcttatttaattaattaatagattaattatgacatcctgggtaaagtttcccccttactcttctccctctggctcctcctttatactcctctaccccatcccctttccatatcttagtttctcttcagaaaacagcaggcctcccacagatatcaagcagccacggcatataaagtagtaagactaggcacctcatctcctattatggctggacaaagcaacccagtaaagcaaaagttgacaaaagcaagcaacagagtcagagacagttccatctcccactgttaggagtcccaaaacaagaccaagctacacaactgtaacttggccctaggtcagacacatggagactccatggtgggtgcattagtttctgtgtgtccgtatgagcctagattggtaatgctgtgagattttttgtggtgtcctttgctcctctagcttctgcaatctttctttcactttttccacagggtctctgtctctgtctctgtctctgtctctgtctctgtctctgtctctctctctctctctctctctctcggtctctgtctgtctgtctctctctctctctctctccttctttttcaagaaaaatgctataggtatagtgaggaaatggtgaaggataaggaggtagatgagcttcaacacacacacacacacccacacccacccacacccacaaccccccaacacacacacacaacaaggaaggggcaaaccagatgcagatggttgcttggtaggcttcccaagcatctgggggacaacctggcactctggatgacactggcttgatcttttcatgacctccagtaaagacctttgactaggccttgcatgtggtctggccctgcagcttgctttgcttgcctgttgttcagcagttgccatcccctggttaacctgtctctcttgtgcttacttaggccagatgattatgcgtgctagtgtcaagttagtttctctacggcaaaatatttttttttcagcactgtttgtttcagctgttaaaattttcatattcaaatgcaatgtttccttttaatatttattgttagtgcctgtcttcctatacttttggaaaataatacacaaatagataatgggggctggtgtggatgtgtgtgtgtgtgtgagagagagagagagagagagagagagagagagagagagagagagagagagatgtagtgtcccacaaaatgctgataaacaaagctgtggaaagaggctgccgtttctaaggataaagtgaacacagtattgtgaactatgaagaaacctaattcaagtctgaaagtccagttattatgttattatatatttaagcaaactcaccttttttgaaaagagtttacagccagtatatgtgtatgatggctaataatcaccttcctgtttcccattgtgcccatttttaggcataatgacctcaggtccacaaccagcccactttcatttgtgaacccacagtgactgacagctccctggatcatgtttggacggagcttatcacagaggttgcctttacctctgtccatcaacatgatgagggaagaggactctgatgtcggagcacatttatgctattgagcctgagaatgtggtagtggggagtgtgtgatcatgagtggatgtggcatcccactctgagccatgtgctcttttcatcaatcgaaatatataagaaggctgaggatgctctgtgctttgtgaccctttaccctcttccttctagatcagtggatgaagagcagcagtaaggaggttgcttgtgtcataatttctcccttcctgtgtgcgtgtgtgcatgtgtgtgtgtgtgtgtgtgcgagtgcgtgtgtgtgtgtgtggccagactgttgggttctttgccattttctgatctgggccaatatgatagctaaacatgtatgccaaacattgcttttagctctgcttcagactctggttcggcatttagatgtgagcaggtagatttggggattctgtttttgtaaaaccgttttggacatcaagtccagtgttaataggagctactctagtaattgctttataataattaatctttcatgtggtgtcttcctccgccttcttccttttcttcctccttctcttcttcacttttcttcctttttgaaggaactagggctttatacttgccaaaaaaaaaaaatatgctactggtgaatagtatcctcaaatctttcctatttttcagatctattctactgggtatggttgtatacacctataatcacatccaaggtcttaggagtctaaggaaatatttcaggccagtctgggatagatagcaagatcccatttcaaagtcaaaactaatgattaattcacattaggtaagcttcttgcaatttgatcctgaaatatatatgtaaacccagcttcaccaatctgctaccttagacaataacctaagatacatccatgttgacagtgagaagagcttcatcaatgagtagtcaaaaaacctttgggggagttagtcctggccaatagaggtttattgtgagataaccaatgagtctggccctcacccatggcttctacctaaaaattgaaaaccttcaatagactccagagttccaaatctgtcatgtcatgcagaccatgacattgtggcatttgtttactggctgttacgtgcttcctactctgctgtcttcccagaacctggtgtctctcctttgtttcccctcacaagttccttccttacagcatcttctttctccctatttgtacattccgtgcccaatgagatgccttcctttaaccctctctcttctcttactaggagcagggatatgaagggttcagctcagcggttggtcacctgatagctggatctggtgaagatcccttctgtggttaacaactgcaaggcccatcattgagaagataattcccattatcttccacagtcctcttcatggaaaaactgtcttcagattcgaactcagttcatctcaaagtttttccatcatcttattacgagagttacatttggttcaacacactgtcattttctgcaatcctgcattgaaatccccgggtcctttggtcattgtgtacatgtcctgttttttcctgtattcatcagcaaggtctttgggcttgagaatgagtctgatttgttccagcccatttattttactgcccatcatttcggcctattcataatacaaatgactcattgcttttattctaattttttctcattacagctaaatgtccctaaacagttaatgttcaaaaaattgttatttccttcctgtgcttctgtactgccagccacatggattttcttcttttattgaactgttcaggggacaccatgacttatcttacttactctcacaacccagtgacttctctgtatgatctttgctgtattgatatgatgcttccattcttaaacaataccaagttaaatttccttgttttatgtttgctggctgatacttgtttatctattgactggccagtatttttttttaattaaaagaagagctgtactttattttccactgtcttgttcatggtttcgaccagtcctgccttcttgtaatccttctctgtttctgtcatgacatacctgatgcaccattgctcaatgataaaaagctcccgtgtgatccttgggaacatgtttacagcttcacctgcaaaatgacaagttgaagaatattttcctagaaaaccattctgtctagcaatgtctacctcattgtaaatgctaccttgaaatccgactacagagataagcagctactgctgcttaatgttcccttcatctgatgtatgcatcttcgtggagtgatgcaattagtcctggacattgatcctgactttctgctatattctataaagttagaattgcagcatagtatagagaagtcctacagaagtaatttgatatcataagtcaccaactccctgatttatctgttcctattctaaccagttcttgttctgagggaacaggaggcctacatttctcagctggcccacctgttcataccaccccagttactagaagagctggtcactagctccgtgacaggcttctgtgttcctgggtgtgtgttcttcccattatcttccatttcatttccattttagtacccacccaaaatatgatgatttagctcctatgtcatccatagtccttattttattggaagaatatagattaggaacttagttgatattcatagattggttgttgattgtttgatttcacagtaggaaacttggaaagcagagagtgcgctatgtatcacacttaaccttttgctgctagtgtgagcttgcaaagagtttaccatgtactacttttgctggcatggggtgataaagataggaaatgggagaggaagttatatagttcttgtgcaaatctaggttttctatttttcctgttttgctactgtttggaaagtacagcctccgttcatggcagcctcacatgtgtttccttagtgccatttcaaaaagggggaaataaatatggcatttttttcatagtgagaatagtaaaatcacgaagatttcccctttttctgttggtgaaacttcaatcgcactaggcacagattcctctacttcagctatgtgtgccaaggcaaagcacacagaacagcatactagagctgtaaaaaccaggataacaagaaatgctacagaacccttacattgcacagtagtagggaggcctgggagccagtgactctgctactccacactcagtggcctgtttacccagctaggtattgtcttcagacaaaggacgctctggacttcctatacagggaagctgtatttctttgataaagctcttccttccacataactgtgcatggtgaaattcaccctgagtgtcttacagtccctacacacagttctaataaatgaattgttctctttggcagttaggatggcatttgaggaagttttgtaatctaaagctttatgcattattagagagcaataaaaagctgtctgttcaagcctatggtgatctgctatggactccaaagggtggggcccaactgtgcagcagaagaaacagtagtagatcttgtagtggccctgatggctgccattggtaattctggaaaagagaatggtttctggaggatgtggagaacacagaggcaggatgcttacaggattcttgctttcttctaggtgggtggcttggcttgtttttgtgtttgtggaatgagaatattctctgaggcaaatgttaagtgtgtatttctagaagagatgttgataataatccctcatcaatgaacagttctgtgcagtctccagatagtattgtggcaggagggtgaaaataatgccttgataagtcctggatttttttgtattgctattgttctttaattaaatgtgtattaagctccaacaaggcgctatgaagaatgtcaacttacagatgattttcagcatactcagaagatttataaacaccaataaatggaaagtcacagcccccctctgaggtggtaaacatatttgttcttcctacaaatgagaagtgcaataggctgtactcaacccgaccaggactgagggtgagaattgagaactgttgaacagagagaaaagcattttccatcactaggaattggattagaatgtattattaaggaactatgcctaaatgtgcttagagttgtgaggttttaattaaattgttccagttactgttaacatttgggttagaaagaggctgccaacgtatgacactatgtttcagatttagtgtcgaaaataattgggaaagagacagaatacttgatactgaagaatttagatttgttcactctatgggaggtgctagggatgtaccttctaatagatatctcagctatttctacaatcaaagatggtatatgttccctttgaaacccaattcttgcttgtctttgttaacatagcctttccttggaaccaggacttttcgtttacacagtaaccatttccagaccttatttagttggtacagttacagaaggcctgtcacatgcttaagttcctctcctgtcacctggtctccaagttatctcctcaggttgtgatattattcccctgtttcttaagtaaaaaccaaaatgaagagcacatggatttgttaagagtatgtgcctttaaatccttgccatttaaagccagtgggacttagattccaccttaagtgtgaacagcaaacaggagacttaactgagaaagttagttgaaggcaaatatgtctacaaataaaactcatggctgaaagatgggagcggtggaaagtgcaggtggaatgaccagttcaggctttcagttttcctttgtttggtgtctttattcacacagactcagcactgagcccttgccaagagcacagtaggtctttgattatcattgactctcaatagtctgtgaacaaggaagcatttgtcaggaaggactgcactgcagaggcatgggcaccattcagactcaaggaaggatttataagttgagatgagagtagtgagacttgaagactccatcctctaggatggcaaagtcacctgtcatggccacctgtcaatttgtaatgtaccagctaggtgcatgctccagtcatgattgttggactcattgtagaatcatactcattcctgactaaggggagatcagataagtgtttttcttatttgttctcaaactcactttttatcagtggtaaccttggacataaaaataggaatttctgttgggagtgttaatgtaaactatctgagaacttcctaaaatatatgtgattcataccatgtgtttgttcccacatcaacacggaatcccaagatgcaattacccatgcccagtctctgcttcgtcatggggctgtgtttatcctttagctatctgcatttgggagtagggccaagcaccctgtaagatccgcacatgtgcacagtgtgatcgatcacacacgaccctttgaatctgaccttggtgtcgtctctcccaaagcacagccctgttgcacacacagtacattgcactgttcccccagaatcccctgttcttcagctgaacaccttaaatggtcttgtccatccaaggtcaagacttttctccttcgtccatgcagctctgtctgtttttcatgctttctctcttctctctgtttttgatttttttcatttcatgtcttttgtctcatattctttcccacttgaaaacttctaatgagatttgcggataaaaccacagtgggaggactgatcctcccttctttctctgtcctcctctgtgcctcttctccgtcccttctctttcctttaaaggccaccactttctactttgccatctacattcttgtccatcatgccagtacattcttaatatttaataacatttatagaaaagtgaatggaaactatcttacattaggtattggttgttagagagagtggtatcaaagctagggtttttgttgaaattgaaagtctctctttctttgtctctctcactgtctgtctgtctgtctgtctgactgtctatgtgtgtatataatccagaactaagtgattctcgtaggcaaataactgacttgagaaatacataactgactaagttatctccaggaatttgctcatatatccctccccatctctggaacccagatttaaaatagatggtggtatccaaattttggtccccttgcttctgggatgcaatgactactcttatgtcaacttaacatccaagatagagttatctgaaaggagggaaccttaattgaggaaatgcttctatatgacccaggtgtaaggcatttttaaaattagttattcatgggggagggcctatcccattgtggatatgtcaatccctgggcaagtagtcctggattctataatacaatacaccaagcaagccacggaaagcaaaccatgtcctatacatcagattctgcctctagaatactgtctgtcctgcttaagtttctatctggagtttcttcagtgtggaagcacaaacctgataaaccctttcctccacaagttcctttggttatggtgtttcatcaaagcaatggtgaccctaactatgacatggggcaagaactttaccaattttgccatttcccatatcaatggagcttttctttttatgtgattacatctatgacctcattcttgaaaatttaaaaaagctcattcaatctcagcttgactgtagaaaggatctcccctattttccaatccattttgatgtaaaccaaagtataagggcttagcagagagacattttcggctcgagctccagctgtacttcctgtttggatagactgtagtgcttccctcttggtctttggtattctgttcagcatgcacagtaaactccatggatttctaaggctgctaggatatttgctgagatgttgctgaagctttcctaagtgtagctacctctctgttgacaatggtaatgcagagagcctgtgtaggctgggtgctttgggccagattgctgggtaatgacggctgcatgatcaagagatatttctcagagtggaaaaggaaattttggaaagagaaaatggcacctagacctggggtgtttctttggcagctaacccacctgttattgctagcagatatgatttctctagtatttcaacaattcgtcataaaggttttgtccaatgtaggcctccgtgataaaatgtgatgagtgccttaccttgccctctcttaactgcttactggagtccagtctcaccttgttgcttctatttcctttaagtagcaggtgacttttaaagattgggcttcctctagaaaatattgttactgattctacttgaatatgtcaagttgtgtcggcaatgtctgtagttccaagaatcaaaataatgcttaagttaaatggacacagaataatctggtcaggaaacgtgagtataggggaaaagaacaaaagctactacaaattaacttaaaaccctttatacccccatattgcaccatagtgtacagtcttgtgtatagacagagcatcaatttcttcttgcaagagagcagaaagagcaagtccaggctcttggtgaggggcttagaaaggacagtgatttgcccaggtttccactgtgcacgatgacagagctgagctaggaagagatgttcaggctaagcactcctcccatcccatctgtctctgttctcagagttctgagggaagtgggattggacagaagtggtgtctttggtgtaacatgtcgaagcagtttgtcatggtgagacaaacagtttgtcatggtgagacaaactgttggttatgagcttcacagggtagagccactacattgtttccttttcttttacatgagtgtataggattcaaggaactgtcatacaggtctctgtgtctcataattagcacatgactggatgacttacttaaactttgctttttgattgaaagaataagatattggtagatgctcaaagtctccttggaaagcgtattgacaatgattctaagacacctgtatagtccatgtagcactgtgcagtagcctgaagatgggctcttctttccttcatttcgctgttcgtattctaccaatgagactagaaatgagtaagttttgttttcttgagtagctctcttcttaatgttttctcttctagaaggggggataaaaataactttcttgtttatataatggacttctgaaatgatcctttgaagcaaagtataggctttggcagtgaaatgtttcatagtgtgtgcaggggagaggggggcaccttttagttttttagcattgttaacacgttgttacctctttattagaattttactgtctatgaagggatttttcagaagaactattttggtgcccctgtcacagaggcctaacgttttattagccccttgtcccttttcatgataatcattgttatacaacatgcaataattggcacgggacacaacagtttttcctatttggttgggggactttaccatggaaagaactcaagcaaaaaagatttgaaaaccatcatcaacattgtaaatatccaagtcctagaacatgtatgaatgtgacttcacatatatcctaccccagcttatattgacctgttttagagcagaatatacttaaaagttacatctgcaatacagttgttgcaagccaaagcattgtttgctttgttgctaatgtggtcaaagtatttattatgtagatatttactgtctaacacttagaaaatatgaatttattaatctctacaactttatgacatgcttggggatctaagttcaatattttaaacttacaaagctgacaaacattatatctatgtatcaaattctcatagtctgagtctagaatctttataccagggtttgttttgtgtttaaaagtctttgaggggcagttctttaattaaaaagtaataggtcatatattaatcatgtcctcagtttaatatatatgatgatatataatgtatattgaaaatttggtcattaaagtagatatataccaagttttgttgataaggaatatgcattttattttatctttttggatatggccatctttttctccttcatagtactagaattctgggaataatgaattttaataattataagaaaagtaatgtaattgaattcatactgactaaatagacttgaaagaaaataacagggacatttataatcatgctttgcttgtgttattagtttcctggattccctaaaatgaacttcatttctattcttaggttgttgtctgggaaggtattcttttcatagtattgtggcagagaagtgacgtccaggtcattgcatgtcagaacacatttgacattctgtatgacttgcgtaaggagtttcttgagatcttaaagtgggatttatatattaccatataaaacatttaacctaactttctttgagaagtttttggtgtatttcattcccaatattgagaaattacaaacacacctggggtattttagtcccatttctgtgatgtgcctagtcatgtcatgactaagcacgaataatgcttagtattgtatttttatattctgggtgtgatattgcatattgactatgattctaggaaaccaggttcccaaggtgaccttttaaaataatatttttaatttttaaaattataattacatcattttgtgttcttccttccctccctttaaccataaatcctcgttttaatttcttttaaattcaagggtctttttctttaattgttgagatatgaatacacacgtgcattcctctctctctctctctctctctctctctctctgtgtgtgtgtgtgtgcgtgtgtgtgtgtgtgtgtacctttctccttttcttcttttcattagcacagaagaaggcctccaacaacatgactaatcacaaatgcagtagttgctcctgctcccacacttctcactgaaatgaatgctcacaactctgtgcatgcaacgcaagatcaattcatttccactgataaatggtgaatggcctcagtggtatgtagccagtgaagccatgcttggtttaggcaaggcctgtgagtaaacactaaaacgcttgagtggaaggtctctaattggcagattattggcacagttttaagagtagcacctctcatatattgccgtttaatatatgggaagacttttccgagtctagggtacctttacagtagtagtgtgtctgatctgaatctaagactcaagttaatcaacttcattcactttttataagataacctagcccgacaaattggcctgtgctcaatgggaataagcagatcccagataatcttcatgagtgtgtgacctttgattcaattttgagaataaattaacaatagcagatgaaaagattgctcggactgaccagtgctgatacttgaaaacaaatgagaatgtgcatggatgcagtatgtagtatgtgagtatgtaggtgtgaagtctgtagtatgtgaatatgcaagtatgtagtactgccaatatgcggagcttctctggtatgataatatggtatgataataatactgacatatctggccatttgaagatcatgcaggctgcaatcgcataagttagggaggcaacgtcttataaatagttcagctgaagcagcaaatacaattcatagaaatggactgcaagtgggatgaaatattgaatttggaggaaagatctatgagcagaattttatttcataaaaatatgtttaactccttataataatgataaatataagcaatggataaatgaacatgctatttctaccttccttagtgccagtgccccgttttactcttagtcaattatcaatgtttgggctaaaggacagtccaccttgctcagttggttagtatagcttggcttatttctctcacatgccatatgtttctgttgagaacctatctttcatagtctgttttcatattcttgccagggtgaagtcatctccctataattctactattgcaacctaaaattacacttttccccaaatgtagtttgttgagctttagttattttcatatatgtctggggtaatggaaatgactcttctggaagttacattgtgtggacagttcagttatgggagtacagtgtgtggataccatcttagccctggcttttgtcttcttgtcttattcttgtgagctctgcacgggtgagggtatgacacactggcacccttggagtcctttgctaccagcactgtctgtgctgtgtcttctctgtaactctttccatcccttgattgatgcatgggcaagttttaagtcctacagcagctgtagacaagagtagaagcttgagagatctaatgggtgttcatcaaaacaggtccgtgcagtccttagagacaggaggagtggcccacacttagactggccatgtggattggctctcattcctcctgctccttcaacaggagttttggggatcaatttcccagttaacttgcatgtaggccttctgggacagcattgtttctcagggaagccagacttacaccttgggacctttctggctatgactggagagggtggaaaaccgttattacaatggttacttaatttgagtgcttgtgatatctagaaccaacattaatgaaaaacaccaaggactccttctaattgttgtttggcctctggtatgctgtttaaccattagctgacaggcagaaccatagtgagaatgtttgtgaggatgtaggattctttcagctgcatttaggagtgctttgtgaagagcaagagaggacataaatctgaaaattctgaaagtagatgagcctattaagaatagggtttgtgtgggaacccgggcagactccaggggtggagccaagatacaaaagagacaccttgaagggggaaagggtctgtcccttgttcatcatgaggatcaaaatgtaaacacaaaggtatgatatgaggtcatgtatggaagctgggggttgtacctgcagaagccactagaatgaggctgggacttgttggtatattgcatcaacctagtctgacaaggggaaatggggatcagctccacctctcagaagagcataggagactggagccagtggaggtctacaagcttgggctggtcacagttcataattagtcatttcactgtatagctcaggttaatcctatgacttggatctttgtggttagaatcctgtgactcaggccataggcagttagtatattttgtgctacaggaaagtacagaagttgaagaactgattatatcctgtctctttgctggcacccctagggaatacttaatgagtgatgcttacctccagaagaagaattaacaatagttatattatgcctattaatttatagttactggttgctataattagtgctgtttatgaaaatcatggtaattatagcactttacaatttaccaagtatgttcccatccactttcttatctgagtctttaagtaatctctgaccaagttagggctggtgatggtcacttctctttccagatgaagaaactgtagctcagggaagcatttaaccagactcaaatctagtgtcctccccaattcactgtgcgtgtgtggatgcactcctcaaatttctgcttatgataattttagaggctcagacaagaaaggaaattcacttggttctcagtagtcatcctgtggagtggtgtgccctgccttctcacctgatggtagttcagttatgcagaatgttctcctcgctctctgaaatgaaagggatccttctcttttcaatttgagtttcccaaactattgcattgtgggtaaatagctgaccctttgaggggcacattagtatttttataaccttaatacgttagtcatgggccagtaagatggatcactggttaaaagtatttgctgtacaagtctgaagacctgcgttctgtcctcagaatgcacatgaaggcggaaggaagtaatcaattctacagttatcttctgacctccagtgcagggtatgacttgtgcatgcctatgcacatgtgcccacatgagagtacatgtgtgcatacacacacatgaacacacacacagacctctaatactaatataaaattaaaaagttgagtaacactgaatctcagattctgataaaacacatttttttttttaccactgtttcccaagtgtgggctggggcaggtgttctagggtagtctttcagcctttgagatgtatgatagtcaacctgatacccatttgaatgaatgtatacccaggtccacatatttttaatcttttaatttcatttttagatcatatattagagtacttactggttcctattatacctcatgccccttacccaaaaactgttgatacaagaatggttacagaatgaaaatccttataacattgacagtatcattattcatcaataaattaagaaaattcctattgaccattgaccaagttcaggccttgatcaagatgatgggaaatagtgtgtccaaaacaagttccatctgtgcttcatcgatcttaccttattgtagggatgaggaggaccctacccaaatggttaaaaggacaatggttagatagtagctgctaccattagaaagataaacagagtggattgggggaattgaaagaataagtagcatctgcagtatatgccagggggcaaaatcatgaggtaacttctttggataacttgctaacaggtacccgtatttaggaagtagcatggtaatgtgtggtggtatcttaggagctgattcccaatattcaatatggatgtagttgatcttcccagtttgcctgatgtagaccaaggtgtattggggctctccttgtgctgactgcattgggtggactgatacatcagagttcactcaagttgtgaccacaagactatgtaaggctgagagaaagtggtatggtgggcaaagaactcatttgcttctgtttgtaactttattgcctcacccttcttccaaatcctagggccacgtccttgtctatctccttgctttgaactgtaggcaaactattcccttgcttttcccagctctgcccaatagttgttgaaaatggccaaacagtactactgtggtcagttctcctcttattggttctgagtgtgggttccatggaccattgacagatgagtaccattgctccccagctccctcacacattttcactatatgtgcttcctgtacagctctgtgacctgagtcctaagtgacctctttctgcttcatgtgttatgagctatgcttaggctgccactaaccagagacagatctctcgtgcttcatggtgccaagtgtggatttttctattgggatatggtttcccttcttaaccattgcttctccactaaagtaccatcaatgatttctgagtgcagagggcctcaattgtatggatcctaaagtgcaggcattgaggaattaatttctttcacttaaaatttcatcaaaatatctaagtatatggctttagagaaaaacattgcaagtttttttttctgtgttcttttctgtcagaaagtgttaatttcttcctgctcaccttactacaatttgataaaatcttaaaaaaggagagagggaaagggagagggagaaggagagggagaaggagagaggggggggggagaaaggaaacaatagaaaagagcaaatttttacttgagaaatttgaactcataatgttatctatggaagcttactgaatttgaatgtgttttcagcagggaaatcctggaggcaagaccctggaggaaaggcgctctagtctagatgcagagatcgactccttgaccagcatcttggctgatttggagtgcagctcaccctacaagccacgtcccccacaggtaggtacttctcacagtgctgcttgagcagtggtcttcactctatctagaaagtgaagtttcttctgagagcctttcattcttatgtgaacctccttaaagccagtggccctacctcctaatctgacagggccccattgtgtctcataagttatcaatgaagtcacaaccctctggtaccatctcccacatcttagcagacattcactgtcatgctaagaacataactatcagcttatactagttagctaccagtaacttcttaaaggtgcattgtcagcatcatccttccggaggatcccttcctggctaagtataggaagaagggtcaaatctgttgcaggccttctgtgtccccttaacagggttctagatgccaaagttaggcaggtccttttgccagtgtgtggtttgactctgatgatgtttttggttttctgattgacagcacatacacctctgtgtgtttcactggattagctaacaggagccattgtattatgttccctaacaaattacagagccgtcctgcttctgtgctgtcaataattcatcactcatcttcatctaagatcgaagtgtctttgttagacacatccctatccccttcccagtgcatggaatgagactggcaggcaggttgggaacaaaaggcaaaacagaccaacgtcgaactctagtgtatctgtgtaggctccgtctgtcccagcagtgcacatggactccatctcttcttcattggctcagctttgcctgtagagcaggcatggtggcttttgtggtgaactgcacagaaaaggaaagtgcattgttgggagcagagtcataggcctttgcagtagctgtctagtagcgtctttcacagtatgagaaaaactgaggctgctaagacaagcaagcacacaggaagagaatggtagcgttttaagaaggttggcagaatctgtgcagtcttacacgcttgttaagtaagccaaaggctgggtgctattgtgccattggaggcatagagacagcagcctgagacccaggccagggtgggagcacacgcgaggctgtaggaagccactctaccaatagcttgcagtgagtttgacaccatgtttgtgttttgatgttaaactgagattttagcttgtcagttataaagcatagaaagttgttgaaggatctcaagcaggggagagctaaaattcattctgaatggaaatggaggaaacgagaccaactctaaaaagatggagatgatcaacagaaccatttcctagaagtgatgcttatgctatcatctgaacttaagcaagtaaatgccacacacctagtttctcagcaaacaatccagtgactgccaccagactcagttatgttctgcagaatggtttatgggctccttttaagctgggtttttgtttaggctttgttttttactcccaagggcttctttttttcctctcaattgttcttttatggaaaattttttcttttaatattttgattagtttatcttctcctaactcctctgatattctcaccagttcatctcctacccaaatcccccctctctcttcatctctctctgtctctctttctctctccctttcccttccttccttcccctctctcagaaagtaaacagacatctaaagaagtaaaggtaggagaaacatatatagacacaaagacacacacacatagggatcccataaaagcacaacaccagaagtcataatatatatgcaaagattgtgtaaggaatggaaggaagaaggacaggaggaaagaaaggaaggatggataggaaaagtcgagccctagtgaaacattctgagaccagggacctccaaagatgcatggtgtggaaaagactgtgctgggagatttttcctgcatgtcaactttcttctttaggataatgtctacatgtgctgcctataaaatagtgcactttgattggtttcttcagcagtgctcttaccaatttgaagattcttgctgcaagtctacactcatggtcactgacagcttcctgctcatgatgctcaggcacgcgttttctcacgtgactagggtatatgcatcttacctctgagatatagatagtatactggttttcatgggcagagaagccaagacttagccagtaaatggtagtcattttttactactatgtgagtataggtgtacccaaagcttagacttctgtttcattatgtattttataatcagattaaagtctttggtatgtatgtatgtatgtatgtatgtatgtatgtatgtatgtatgtattttaattgttttactgttgaataaaaaaaaaagcaggaaggtataagtaaaattgttccttaagaatcagtttcccattaaaaaggaaaactttcatgaggttaaagtaataactagtatgacctctaagatacatagtttcataattacattgaagtctatgtgctttgtgcctattccattctcgaatcaaagcatagtctagtctattcttttcaattattctaacttaggaaagcaagagttaattaggcgctccagctcatcctactgtattttcttcaacccatgcaactgaagtggatgtgtaagtatttattggctagcataattatatgctgtgagaacaataatcctacacttacatattaaactatgtgccaagagcagatgatgtcttctatagaccacgttgtactatagttagaaggaacctgaaatagccccaaagaatagactttcatacctaactttgatgttttctgttttgaggcaaaacattttaaattcaaaacctggtgacttacctgaccacctcaagtaggctacaaggtctgtagtctgtcacgtctcaagtagtcattgtgtttttcctgtctgtttctgaatcacctttatgtggctactgtgacttatgatctgcagaaaatgatgcctaatgtgcaatgtttgtgcaggacgaggttccagggagcacatttacatggcagctttcacagggtgcctgttcttgacaaattttgccaaagccttttcctcttttttcatagaagtatctcccatcttcaagttgttgttaattctaattacttttttgttgttgtgtctgtttggacaacgtagctttaactctgtatgttggaaatgtaaaggcatgtgtcactatgccctggctctagggaattcctaaacttttaaggcaggcagacagagacatgatctacagtgacagaaagaagcgcctcgccatgctttctactttgccatgtgcctcattacgtgctgaaactattcagagacattttgtaaaaaaaaaaaaaaaaaaaaaaaggaaacaggatgttaatattgggcctttcagagctagtgaggatcgtgccacacaggccttggctccttctgttctcaaaggacactggatttctgaaggacactagagctcacaaattataacagcaatgaaggtacctttgtttgaagcatagtttgtttctaatagtaatataaactatgtgtaccttaaaggagaatgacagattaaaaattccagtgagcttaggagctgtggcactcttactgctggaggctctcccagggaaatgctcagtagggtgagcaacagtgtttctggctatggtgtgtttagatgaaatacctttagtaaatttacatcgtgtgtgtgtgtatgtgtgtgtgtgtgtgtgtgtgtacatatagatcatttatattatatgtctgatatatcaactgtgaaatacttttagcaaccttgacattatatagatcatatatttgtatgaagtataaatatcaacataaaattacttttgtcagcatttccaagaataatatgtcatatatccatgatatacaacaccttttgaatgtttacatggtagatacatatacatatacacagggacacacatacacacacacaatactacaagaaagtaaacaaacaatttagttaagaattaaaacttaaaaacattttatactgcatactagaaaaacattttagaagactaaacattgagaaatggaaaggaattgtaggcaaatggcaggcccaagatgatcatagaatatcagaacttatgtggctcatagatcatgcaactaaatttgtaacatagcagcaaagaggttttatccacccagggaaagggtatggctccagaaggcttacttagcagccagctgaataaccattttcattttttctctgatccataaaagagcacttctctgtgacagcagcagccagccagcatagttcttataaatatctttactttattttcaaaatagtatttttatggcaatttcattgtcttggtgatttatcaaaagattagacatactaaagccgaagtgcaaagtaaccagaaatcgtaagatgatatgctatccttccattttccagtcctagctcttggatgtttgctgtcacctcagtttcagcttaggctcctagttggaaccactctgaattcttgctgatgtgtgtcttttagaaattgagggtcaatcatcacatctttttccttctccaaagaatccatgctaaaatccacctcctgattcttattcttagactgccttctcttcccgcacggtatttattatggttggagatgtcatttaggttacgtttttgttggattatattaatgttctactgaaactgaacatttaacaaccttttttcaatcataatccattttaaaagatctaaagggatttcactactgtcatttagactagtgtaacattacaaaactacaaactgagttatttgtgattgagaaagagggagaagattagagagaaagacagacaggactagagttgctagagaaagcattcaccctgtttctatctgatatttctcctcatactctgataaaagtgataggatagaggaattgcttttattttaataatacttttcccttgaccctggtcctgatcctgtagttctcctttattcatggcagctgattctcattatgaggtgacacttggtgagctcttggatgaggagctctttaaagctctttaaagctcttggatgagagctgtggtttaagggctggagttttcatctgtaccttctatgctctgagatagggagaagacctgtggttgactagatcatgcccctgatgaaggctatagaaattctaaagatggagttcagagaacgtctcagttgttgaagtgactgcccttagctgtccactagcagaagttctgcacttacggccgttgtagacctagctcagaactcttgtgtatacctttacatttgtgccctttacgatggcctctaatgttcattgcccagtgcatggagatgtttactatttccttcagccactctagcaaatgatccactttaatcatttgctgggaccaccaagttggagataagtcacgaagaaacaacctggtgctcagcacgtgcaattggcgtgagcatgcacagcttatggagcgtagtgtctgcagtgaaccaaggtcctctgaattcaattgaattcttgcatattcatctggtgtcagatgggaaatggatatcaaagtaaagatttatgtgaggcatacattcagagaacacaagtacattttctcttgtcaagtaatagggaagagttggagagcttttagacaccaaggttataatgggtctaccattggctgctttgtctccagtctgtaaagctagaacactaccctttcacaactgtgaggtacacatcctgagagaactcccttgacataaactagtctccagcaccaatctagggttgctttcattgctgtatttaaaggttattagcacatgtttggggcttgctttcaaacacggggttttaaaggtgataccaactctttatgaagactgcttgtcctgaaaaataccaactcatcctttctaggacagaaagttgctcaaacttctctctggctgtccattgtcttctttatctgtagcctcagccctctcacactgggtgcatttcatagagcagcagattatgatgcagactgagaaaccatttcaggggtgtagacactgcgctaaaggatgtttattaggaattcatgtggcctgaggtattaagtacaataatcagggtggagctatgtggggccatgggtagtctcttctcttctgatcccaagttctagcttgccaaagccaggagcagctgcaggagagatttattagtaattaaaagtttaatatttcatattattcacttcagcctaaacatgccgactactgggagttgagagctcccgcatgcttatactgtatgaggagcatggagtcttgcagacacaggcttttactttggagacttgtgatacgaacatggtattttctgttgaagcagggattgggatagtaccatatccatacttcttacattttcttgtgaaccataggggagcacaccttgatttgttgagaatggatttgtctatatattgacatgaaatgctttagaaatgctatgtggaagatattagctgaaataaaataagatgtgaaaaatagccctgtagaagaaaaattgatgtacattttgcagtgcccatgtttagaggatctgggttattttgaactagtctgtacctgccagaagacctagttaaataacaatggagtgggggcggacaagcggttagctgactcagagttgcatgctatgggtttgatgacgggcaattaatttttagatcgcatataattgcacctctataacatttatatcttttctttctttgtaaaaaaggcgatgtttatgtttgtgtcatatgtgatcaatatagtcaaacttagctgttacaattccccatgaatgccatcaaatgtaacattgagaataaaaagttaccaccacccaatctacctcgtgttgtaccctgacagacatgaataccagtttaaagtattcagtctaagccatctccttggacagtaatgtggttgggggaacagatagctgtgacaagtgtcacagcacccactcaactgaagtccaggaggcagtgttcttgctgtggcacctcacctgtggtctcagagttgccttttcctgcttgttagaccttgatgagtccttggccaagaacaagtattccactaccccaaatcactcaatccagtcatacgttcttgagttcctattttataacagcatgtcagtggacacaattagccctatgtgcatgcagaagctcacatcacatttgcaagactaaagagtactcctgtcaggactgccttctctattcctcactttctctctcactatttaaatgtctattttggtagtagtcttcctctgaatcaacagttcttttccttttccttttttttttaaacagcaaataagcaatgtaaagcaaatacaattgtgccttatcatgtaagattattagacataaccacagaaaataagtagcattcatgtatgtgtgtgtgtgtgtgtgtgtgtgtgtgtgtgtgtgtgtgtgtgtgtgtgtgtgtgttttaagagaaaaggttgtgtctctaattgtgtacagtcctgttgtgtgcatttagacacacttttctttatttggtttgtagccaaagtaaagtataatgatggtttctctggactgatgattggagctgctttttaatcactcaccttacatatcattattatacgtggtgaataagtctctggatctccaaacaactcatcacgttagggtttaactgctaaagttgtttttcatgatgtaggacatttaccaggaaaaccaaacatttgtttcagttgatacagtaattaataatatgaaatttaagtttgctatgttttgtcacttgaacatacctatttcctcacagttctaatgagctgattttgctttggaataaaagatcaaattgaacacatagtgccaatatgcactacagccttagtatgattatcctttcagttattgtctttacgggtagatggaggaaaactttctgtgtacttgtgaaagccctgtttagtaccagagaagtcaactggctgcgcttcagtatattaagtcacaaagaactccagtgaaaaataaagtccccctacctcttacctcataggatatgcatcactgtgtctgtgtaaataattacgcccccttaagtttgaattacccaccccccaaaaattgtgataaattccagaagacctcaaggcaagatcaagattatcattatctcaacataaaataacattcaaattcatgcttgttcaataaaccaagcaaagttgtcttcagctgggccatctcctccaaggaaatacggtagaaatcctgtctcaggctgaggtggaattcgtgcatcaaagtcccatctgtttcttactttaccataataaagatataattgcactataaaaatatatccaggtgaatggtggctctataagaacaactgaatgacaaccactgattaatgtgaactttctagttttctttaacattaacttctgtcatttgaaggttgtgggtgttttgagaagatgatggactataattcagtattatgcctattctcttattattggactgataaaagaaataaatgtatatccttgtgtgtgtgtgtgacacacagagagagagagagacagagagacagacagagagagagagagagagagagagagagagagagattttctgtaagccctttcacaaggcatcactcacctacatttttgctgtgctctttattagttctttgaagatttcatgtgagttgattgtgctcacacccttccccaaatcttccaagatttctctttcctacccagctctttgtcttcttcctcctttcaagactactttgtacatctaaattctcttgtccactgaaatatgatactcttaagagtaaactaacccttgctttccagcagctaataattaccagtaactcttcagctaaggtaggaacttagtgtccagctcccctctccctgatagaatttggtttggcttcagcttgcacgtgccttgtgtgtgctggcataaccactgtgagtttatattttcaacttcccttccatatccagaagagacttttccctttggccagctactagctctgactctgatatccattctttccccactcccttctgcaataaactctgcaccttttttggagtgagtgtgatatttctttcatttatggaggacattctatagtcctctgttctttgtacattaacccattgtagggggcagtgttcattatcatctagtataaatggaaactctgttaaggagggctgacagacagattaatctatagatatgataagtaattaagttgtttcactgctgtgtctttataagaacaacagtttaggttttctcctagaggtagtgaattgtgtagccatgctgtgtcctagcctagtaatgataggagtgtatggatttcatctcatagactggcatttcaatccaatcagaaaatgatcagtaactcacatgttttttgtgcaactatttggctttttaagtggaagtgaactttacatatgtatataggcctgtgaaaaagtacatcctgtagtcttcttgtaaaaagataagtgaatcataactggatttttgtatacatagatgataagcagtaagttcattaaatgacatcatagagaaaataaaatatatggcttacagtgaagagaaggatttgctgctttgattaattgaagaatataatgttgtatagttcataaatttcttaaagtcacactatcagctgtttatatggtaactggaaatttttctaattctattttgttatgtactgtacatggggaactggtgaagatattatatattatttgctgtttggggtgctaggctctttattagactccccatctgtgcctttccaatgaagtagcatacacattagtcaccatttacgtgatattttctgggcagacaaaaccagaaaataaggttggtgttaatgttgtttccagaagcatcaaggataaatttctatttcatgggatcctaattttagagctcactctctcatccactggactacattaaacagaattccaatttttagctttgtgtatgaggaagtgaatttcatcgatattgtggatgtgctgtcataggaagaataatgcttctctgtttgcagcagtactaaaagaaattccttgaagtatagtcagaaggaaggatatggacagagcagaacttttcatggccatcacctttctaccattattcagtaggtgaagtgggggaggtgttgtataaaagaccctggtgaagactttgagaatcatacccttgagagaggacctgagatttaagactatggacattgttcacctactcatgtaatgattgcatgattaactctttatctctttttatttggttattgattaagcataaacccactgttcagttgctgaagtaaaataggtcctaatcacatagaaagacagacaaccttccttgttcgtgtgattgaacattttagatgttgggcttttagttgggtaaatagcttcaaacaaggaaacaaacaaacaataactcaatactttcagaatcatggatggcttcttttagggtttgataagctcatcttaaaattcagttgcattttcaatgaccttggaaatgcaagacagtttaagataaaggaggaggagtactagaatagtaacaccatctaatttcaaattttattacaaatctagaggaaccaggcaatgtgatccaggcctatggtaagtatatgtattaggatcacagatatggaagtccagaaataatccattatgctaatgttgattgatttttttaacatacttttgacatatttataagtttaaaggatagtttttcagcaaaccatgttgtagtagctaggatccatatctaaaaggcttcacatcctatataaaatttaatggaaagtagattattaacataaatgcaaatcttgaaactataagactcctaaaagaaaacctaggaacactgcttgtgatctttgactaatgactggcttcttacatgttgctcatagaacatgagtaattaagataatgcagagaagccagacttcatgggaattaagcatttctgttcatcagatgccttacttagagctttatttctgtgaagggacgacatgagcatagaactctattgaagaaaacatttaagtgtagctgacttaccgctcagagattcagtccattatcatcagggtgggaagcataacagaatgcaggcagacatggtgctggagaagaagctgagatatctacctgcagcaagaagagagagtgacaaggggcttggcctgagtatctaaaacctcaaagcccaccctcagtgacacggtttcttcaactacctattccaacaaggccacacctcctaatagtgtcactccctggtgagcaagcattcaaatctgtgagtctatgaggtccattattattaaaaaaaaaaaaaaaaaaaaccaatatgacaccatcatataattgaacaatgaatagaacagaagtgactacttatatatcatacatatgaaagagtttgcattcaagatgtattcaattgttatttctcagtaaagataataattaaatggacaaaagatttaaacaaacttttctgaagaatttactggatgatatgaatctggtaccagtgcaaggacataagttcagacaacagatggaaaaccagtcatgactgacagtgagatttcagggtttctcaagtctactccacagcttcaagaactctctttcttagaattgtttgtttcctgcttcaaagcatggaagcacaaagatccttgattttgttccaggactctggtcgactatttttggcctaaggcaattacctccttcccttaatcagggccttgcaacttgccttgatgctgttgtacgtgtatcacttattccggttctcatagacagagactgccaatgatctcagaagatctccctactgaggagcagtaattcatcaacacagaaaagggtttcagatgaaacaggaaccattacacaagacacaggttttcattcctttaagtcttttggcttgacatagtctctaaacaccattatttaagagagttgtcctctctctttgccataaccctttaattcagttcctcatgctgcagtgatggctatccatacattttttgtttttttttttataactgtaatttcagggtgttatgaatcataatatcagtgtcagtgttttcccatgatcttaggtgactgttgtgaaaaggttgtttgaaacctcccaaagaagtcacgacccacaggtttagaagagctgatttaagatgttttagggctggctaagataaccaagtggctaattactaaccctcactaaatctcagtattgttcactgcacactttacattgaaatactctagacatttcatgtctgaatgtttatttctttcacccagtatttaaaaaaaaattgggcattgttttgagcttttgttatttcactaaggtaatcctgtaggtgctactgtagttaatgggattcattgtataccaccagagatagatgtctgaaacttaagggccagtcatcacctttaaggtggagtgtgtgtgtgtgtgtgtgtgtgtgtgtatcccaggctagcttggaaatcactttgtagttcaggcaggctctgaatttacagagatctctttgcctcttcctcttcagtgctggagttaaagacatatgatgaattaaatctagttgtatacagttattgaaatgtatcaaaataattgaaatgatggattctatacttcatactagatacaaccagcatactttatcttctaaccttacctctttcaccttttaaattctacctggataagttacttaaaacttttttgcctcagctttcttctttctgtgaagggataatcgtcggatggcaatgaggacaatattagtcaaaatagtagtttataatgagttacaatgtgcaaagcacttaaaacagtgttcggcatatagttagcactatatacattagcaaatcttattgggagctcggtgcctatttttaaattgttattgcttttctgtagagatattgatagataaatttagtttgtggcattctatccaagtctctgaaatggtttatccattcatttgagctgaccatcatccttagatttttcaaggacaatacagctgtctgtaggctttgcccaaaaccctttggctttgtcggcggtttctaatggatggtctcaaaagccagagcttgtaccatcttctgacaaatgagtcaccccatctgttcttgcggattacaaagtaatttttctgttcagtgaatgaagttcacattatgactcatggatttgaaatttgccttaagttagtaaccattgatctattgttatgtgttaatttttctatatttacccagccagagactaaaccacgtaaagcaatggctaaagtctgtttatcacaatgcctttatcaggctgttaagcaaggttggctagtctctacccactttctctttcaatgctctagagtggggtctaatactaggtatttctacgaatgctttcaaagcagtgctattgtctatgccagggtttgtttttgaatatttgaaaaagtatatatcaagacatgtcttccaatccactatacagcagtcaatgacaaccattggtttatgccttcatcttacagtggcgataactaatacgagagaaccatcttttcctgggtacatggaaccataactgtatatttaacaaaataaaaggtgaaaaattataaacgtgtaataacttggtaaaggtttagccagctccaaagtgacaggctgtaaattagaaagcagatatttcattttgagcctgtagttctaattcctcccccagttcactgctggtgtgtctccttcagcatcccaggccatgtctatgccagtcatttagcattgtcctgctcccctctaactttcttcttgacagcagcatggggaaagcagtacttgcagcacttgtatttccttagggagagatggctctgagcaagttctcagagatgctagatccgtacactggtgatgctgtacaaatacttggaggcctagagagggaagtaaaacactaacatctctctgttctcatacagattcacagggcacataatgattgtgcctgtagcataatatgcttaaactaatctagggatatttatggaagtcagctgagtaaaaaaagtttggtgaaatcaaagagaatgggtgaaatggctcatatttagagattagtgaccttgtggaaaagtctgttctttctcacaactgcctgcgttgtattccactcgatgataccttcaggcagttaactttttggtcgtgacctattaattaattaattaattaattaacacaaaagtacagtccacaagtagggaaagccatagttcattgagtgcttgttttaatttctaagtttatttttcttttagtgaaagaccactaatgacatcatttttcagccacttcgtatcttattcagaggattccatttaaaaatcaaagaacacagttaacagttgcccttcccaatattataatgcacttgtaacagaagagtatgtttaagcttgtgacagataattgtagggctggaggcatatacatagcaatggattaactgtactgcattctggaatcattacatcataacctgatcaaacagactgtgagcactggaaatgtttggtttaggtgaagctcaggcagtatagggcaaatgtcctgaggcaggcctgggaagatgatatggactttctgtaaagtcatcccgcttctgccttcctgtgtgccttctatacagtgatgactcaatccccagcatctcaggaatcagaaagtatgtacaatattaagttactgtgcaatcctctacccatccactgcacaaatacctcaatgcccgcaattcttcaaggcaggtactaacaaagttatgcacatacacacagaaaaatcaaaccaatcgggggggtcactaggccccaggatcaccctttcttctggcattcctgttttgtgaagctgctagacttgttcataacgatattatataatattcctcatgacatacaaatgctcaagtgcacacggaaaccactataactacatggtctgcttgcttttagtttttatgagctagttgttgaataatctgatatatgctgatactatatcttagaaatgtggaaaaactcacctgcattctcaaaaagtccattacagaatgcagtgcttaaacccctttcttccagttttgtgtttctgtcctcttagtcctccacgacttacaactatatttgcattaacgtactattggaagagagtcaatatataaactcgctcatctggaacctatatagctgaagtgtggaatcagtttcaggatccagctgtgtaactctttactcttgtgctatgagaacctcctagatatgctactggaaatttcttatcacaatcctgttcttagtgtgaaactacaaaaacagttttcattattgaattgttgaacacctcaggaaatattattattattgctactgctattattattattattattattattattattattattagtagtagtagtagtagtagtagtagtagtatatttacaattaagctgttgctctaccgcccggtcctccctccacagttcttcatcccattcctcatctccattgtctctgataggatgctcccataccaccatgcctcccctccctggggccaaaagtctttcaaggattaggcacatcttctcccactgaggccagacgaggaagtcctctgctatatatgtgccagtggccttggaccagctcatgtatgctcctagttggtggatcagtgttatctgggagctgctaggagtcctggttagttgagactcttggtgttcctgtgtttttgccctcccattcagcttctttagtccttcccctaattcaacaacagggtccctgacttcagtcaggtttaatgtaagtatatgtgtctgtctcagtcagctgttggtagggcctctcagaggacagccatgctaggttcctgtctgtgagcataccatagcatcatgaatagtgtcaggccttggtatctccacttgccatggatccctagttgggctgatctggactgcctttccctgtgtcttctccattttgtccctgtagttcttttagagaggaacacttctaggtcagaagttttgactaagtgttgaggccctgtctttctactggaggtggactcttcaaattctttctccccactgttgggcatttcatctaaggtcactactattgagtcctgagagtctctcacctcccaggtctctggtactttctagaggacctcctcacctcccactttctgaggctacatatttccattcattctgctcaccctctgtgtttctctcttgcccccctaccttatcctgttcctcttttcccctccccctactctctcctccccagatcccttcctccctgtatccctcgtgattttcttcccccttctaagcgggattgaaatatccttacttgggccttcctgcttattaaacttcttattgtttgtaggttgtatcctaggtatcctgtacttttttggctaataaccactatcaaagagtgcataccatgcttgtcctttcagttctatattattgtgggactgtgaaaggcaccctattttctggttgagctagatttaaaccccagtaaccgagcagattaatctgcaagggacggaaggaactttgccacgtgcttccagacactatgctcctgacacgagaccccagccccataattctgtagccatcagtcatgtagggcaatgccccaggctcctagtactccgtctggagtccaccaccatagttacctgggaatatccaggtaggatggccccctctaaaaggggctgtttgccccctcctttctctcttactctcttcccctttccccttacccccaggctagagcctgccctcgtgcccccactctgttctcagctgttctgtaacatctagcgagtgtctgtggtgtccaagagtgagaacctaccgtcccttgcccccgtgcaggcctggggaccccaagtgaactcgagcagttctgcaggaacctaagactgtgcctccctacccccagagtggggtgctgcagcttctcacagcccaacacccatctggaagcaatgtggggtgcactcattcagacttcctggcctggtgtgcctcacccagtggcctgaaccttgggccagattcgggaccccatttctaagccacaggttatcacactcaggtcggtattttttctttccatccacttgcctacaaaactcatgatgccctcattcttaatatttgaatagtattccattgtgtaaatgaaccacattttctgcatccattctttgtttgagggacatctaggttgtttccagcctctggctgttagagataatgctgctatgaacatcatggagcatgtgtgtctgttaagatatggtagagcatcatttggttatatgcccaagagcaatatatctgggtctttatgtaggcctacttccaattttctgatgaaccaacagattgattacttaagaggagaaatttttgttttgagtcatggttcaagttttgtccattgtttgctggttgctcttaggctagcagtatagtaggccattgtagtgcaagatcagggaagaagagaagtgcttacctcttgtaaactaagagacagagagagagatagaaagatgggcttagatgagatgaatatgtctctaggttgcctgcttccagagacctctctccacacagtcccctcttctcactagatccttctacactttttgctatgaactcatcaataatccattaatgagtttagcatcctaatgacatactcccctgaacagtaccaaggggccgtgagccaacaagaccctttaatatccagcagtaattgaaaggtgccgcattttatatggaatccgctatagcattgccactatgcctataaactcaccattttgtgccactgttgacaaaattactacctagtgtgtcaggttcctttcctaaggtcttagacaaaacatcctatgcagatttcattttgtgggaaagacaaacagcctgctatatttctgcaaccaaaaccagagtgagcagaaggtgtctcacaccttctaatgggctcctgtggacattgggaaagtgttcttgatgttggattgatggtgtttttactcactgagtaaatcaattattatgtaggaattcaagtgcccattctttttatccatgaattggttcactgagcctttccttatcgttcttggtttgctttgctgcattgaataaagataatacatttttaaactcttgtaatgaagaagaccaaagatagaaaagaaagaatcattaacgatgaaattgtcagtcaggatataccttatgctagaaaaatcagaagagatttgtatctaaataacgggaacgggcataagaagaagctgataatggtagagagtgcggatggctctggtttgcaatcatctccaggactatatgagctgggaagtaattttgaaggtcttaagaatgaagtctcttaccaagggatgctctaggatatgtatttgactaaaattcctcaaagataattgtactttattggaatcttaatggaacccctacccattaacatacttcatactccacaacttcattagcaaaactcacctgttagaaatcactatgtatgctaattttcaaaagcagtattcagtttaaggcagttgctagcaatgccatgacggggtttgaaaatccaaacatgtcttttaatattagcaccagggcgaaggccttaatccttgttatttgttagctggagtctcaataaagcaagactttagtagtttgttagctcataggcgcttcaggttagtgagctgactggaagagctacctaccgattagtggcagcaccagaagtccctcaggaggaagtctactcctttcactaccagaaggaaacagcatttatttgctgccaagccccgaatgtgtgccttagatgaactgaaatttatgtcaccagtggcttactgcacccccaagcattagctgatgccagtgtatttcgttggtctaagtgtcccccagtgagcgtcggggaactttctgcatttagagaaggaaattgagttgtgtgtcattttcaaggtaactgcaggaacttctatatagaaaggaagtattcaaattatataccaatggagagagaccaagtggtctttaaaagaaaataaaacctaataataaactgggttaattataaaccatccactgtataaaaataatgttaatggtttgatttttctttcaacttaagatttatttgaaaatgtcatattaaaaactaggctgtgcaaaatgaaccttctatttttataatactccacacaagtaagggatatttgttggtgtgtgtgttatttgcttttctattgttctgataaaacaccatgaccaaagcaacttataaaagaaagtggttaattgatcttatggattaatagagtccaggatggaatagcaaagacaaagtgtgatggaacagttgagagctcatatcttgagctacaagaaggcaaataaagcaatggaggtatgttaaagggccttttgcagtcttgaaagccactcccaatgagtgacagacctcctctaacaaacaaatacctcagaaacctttgccaacagttctaccaactggagatcaagtgttcaaacatatgagcccaggaaggctgttctaatgcgtactacgacagtattttgggggagctgagttagatagtgatgcctttgacagtcattttttatcaaggatataatttgtgtatggacctggcttttattccctattgaagcgtaagaattcagtattcctggctagagggatcagaaggaacgagacaacagaagccatctctcctaaccatgagcagcttagcttggtcttaggaatagggcatgagacgtgaaaaatggtaaatgtacagactcaaaacctgtgctatcatcttcttgcaaatgagttgaacgaatttgtgcttgttattaaagaattagcctataaagcaaagcattgtgttgtgtccataagactttgccttcaatgattttagggccccatctttcaaaaaaggaatttgttcaacagtttgtacagtttttctacctctatttccttttcttttgtctgaattattctgagaatctttgctgaacatgcttgtggtaaatctgggctgatttccaccttagagcagtttcagtatagcctgggccagtcaccagcatgggataaacttaaggtagtgagaagtcttgtgcatattgatattggagtcatgtacattgctgatttaaatgatgcctgatagacccatgggcagtacatatggagttctctgagaatagatagatgctcttgacccaggagaaaagcctggccagtagggtgaatttggtatctgggtgagtttccagcaatacaccagaaactcgattacataaaagaacattatttttcttacctttacttttatttagttttggggtttacaagtttagtctctgaacacttcatctctttttgaaatgtaccattttagaagagtataaagctgcttttctgggcttatgatgggtaaaataacaacctagtaatagtcaaattgtaacttctagatcttgtggacaaatttctttatttgtttagtctcaatgggctaaaatgaatagagaaagtttatatcctttctcgtttgagcttctagagcctgcctgcattcctttgtttatatcctcatccactgtctggaaagcctgcaataaatcagctctttgactatgctttcttccatatggttccatctgattagacagggagtannnnnnnnnnnnnnnnnnnnnnnnnnnnnntattctggcaaataaagaaatttgtccacaagatctagaagttacaatttgactattactaggttgttattttacccatcataagcccagaaaagcagctttatactcttctaaaatggtgcatttcaaaaagagatgaagtgttcagacaggaagtaggctttttcctttaggtaatacatcctgagtttatgttgatagtaacagggaattcattcatttagtgcagacatatgcagtctgttgtgtaatatctcattaaggtcagtagcaggtccttgctagccaacagtgatttgtagcggtttccacgggaaatgaagtacagtggttacctgttcttggaacacatttcagtatcttgtatgttgtaaatgttcacatcattattttattctttctccttgctttggttttgccctgatgggaatactactcaaggtctaaagcctttctgaattttgttgttgttggttgttattagtatgttttattactgtaacaaaagacctggagctaaaataaaaattcttggaggttgacattcaagcaatatggctctgttaacagccaagtttttctgcccttacttcaaggcaaatggcatcatgggaagagtgtcctcatatgcatatatcagaaggcaaggtttgcctccatgagcattcatttcataatctgcttttttcacaagatccaccttctaaagattcccagctcaagagtatcacatttaccaagcttccagtttatagaccatggtagtgttcactaagacataggccaatcatattatcgacctgtgaaaagttgccctagctttttcaagccgcttgtagcctgcccaagaacagcacgattatgtgcctcagttacagtgcagcccacgttgtggtgcttcctggagctgatgtacagtgactgagccagcatagaccttcagatattcaccccaggagcagtacccattctccctggaattgtgaacatatttaggaagtctaatcatcacctctgtttcctggtgcctttaatgtaagaataggtgattaacgtgtatgcttgtctaagactgacttgtcatacatatgagctggagaacagaaatagatggaaagatttttgtgatagattatggaagagaagatgtattgttaagtcaagtccagttacactgttgagttgcagagcagatcagctaaacaggatgttctcttgtaactctcctgaggtgggctcaacctcaaaagagaaggtgtgagtgtggtgtgccctgccggagcctctaccgagtgagtcacttatgtgaaaatgtcttgacatacatagaattgtagagcccacactgtatctgatcacagaaatgttactgcataatagcaagctggctttgatctccatgggattgcaggctgggggatgaggaggggtggcttttgaaaggtcacctctactactcaggagaacacagagtatcaatcccttatatctgcgagctggtgtagcaagcattggaagtgtgtgcattaaaggaaaactgccatgtatcttcatgtgtgaatggggtgctttttttttttctggaagagcttagcatcctgactactttcccttctatgttgtagttgatgatatctcacacccactggtgtgtgaagaggaagaacctgctatgcctactttctgtgttagtgatgtggcataatgttttctggaaatgccacacaatttcaaatgtgactcctttctaaacttgcgaatagagttgacaacagtgaaatatgtcctgtaaacaaaccccgagacactatcttttgaatgagtggtagttgaatttataccaaatcccagaagtaggaagtcccacatgtgtggagttctctctgctgcccgaggcccacaaggggcagtgccgggaacaaagcctgcatcacctacttactctcattccagtccagcacagctgagtccaagttttatattctattactcacaatccaaatcgatggtaacatataatattttacctttattgagtaaaactgcaactctcttctaaaggtgattgcattgctatgtgactttttatgctattaaattcttctactcacatcttatttctggaattgcaagagaagtaaccgaaggactcatttatctctttttatgaggtacttagtggacattgttgaatgttttctggatggtgagggtacaatcacaaataaagtgaaatgtacgtccttaaagggttcattttcctgtgggagaggattcaaaagcagacaattatgtactaaagtctaactaagtggtagagagaaagttgaaggtaaaacatagaggggatgggatggtctggtcattgcgtttttttctggggtttctggggagacacttaagatgaggtagcattggagcacagctacctaggttgtattgaaacaagctattagatgcatgttaaaggatgttccagacaggcacgtttcaattttttgttattttaggggatagaggagaaaagacggcacagattctagccagcaatggcatgggtcagattggaaagcagcctggattggctgctgcactctgtgaatcaagatgctaggtatcagtgagaaagaaagcagctcctgatcatggcacagggctctggactctgggtcttccttagagggagctggggaacatctggaggctttgatgagaagtgttctagtcatggtggcctcctgctggaaaacagacaacaggcagtaatgcttcaaactacctagatgtgaaagctggcaggactctatcaatgagacaggttgtagacaggaagatccaaaggtttgcaagtctaggactgatggcctaatcaacaagatggtgggcagatgggatgtgagtagtaaccacttactgaggttccagcagacagaaagagcaggcatttggtttccatttttagaggtgctttcattttgacatttattttagacttttatttgtttgtggtagggtgttggatgtgtgtgtttgtggcttgtgtgtgcacatatgcacacagacaccgtcgtagcttattgggtatctcctcatatctttctctatgttgttttactttgtgcatgtacaggctttgctttcttgcttgtacttatgtctgcacactatgtgcctgcctggtgcctacagagttcagaagattgcattggatcttctgggactgaattctcagttgtgagccactgtgtgggtactgggattggaacctagggcctctgcaagagcagcacttaaccattgagctctactcttaaccattgagcgtcttttcaacctttgtcatcattagtttttgagacaggtgtgtcatttgaacttgaagttcacttcttttgagtggtaggctcagaactcctgaaatccaaatgtctttgtttccaagtgctgggcctttgctgggggtctgaatacaggtttcttgctttaaaagcaagttcttttatctaatgagccatattcttagctttttctttcttttttttttatataatgggggaaagggagaaaagatgatcaagaatttgtctttgtatatgttctgtttgtcctgttagaatctcagtttctactgaataggtgtatattcgaggctcaaagtcaatctttcctcttgatatctcattaggagtcagcagaatgaacttcagaactttgccacttaaagactaaaatctgagacaatattttaatgcaatggagacaaccgaagaaatgatcttggaggcaaagaatatgcctgtgggaggaggccccaagcacagtggattctagaagctaggaagaacatttctgaagacgatccagtcacttgtattgtatgatcaaaagcctaaagattgaaatttgaagcatacagttcagacctttggtggagtttaagatggcatgggcattctctgtgctcttcttcaatgtttattcacttttatcattttttgatttgtatggatgagcctgaggtgctaaatgatcattcagtgcagtgggccacagtgttagatcccagggcagggccctgcttcaacacatgctgttgtctgaacttctgtgacctaattaacttttctctgttttaaaaaatagactacattcagtaaattgccaggctatagttattttgccatttttacctctggtttttggtttgcttggttttgttttgtttggttctttgaaattcaaaaaatcatcagatcctactagaaaagcctatactcaacaaaactggaaaatctggattaaatggacaattttctactcagataccaggtacctaagttaaatcaggatcagataaaccatctaaacagttcaataacccctaatgaagtagcagcagtcattaaaagtttcccaacccaaaaaaaaaaaaaaaaaaaaaaaaaaaaaaggacaaacaaacaaacaaaaaacaaaaaaacaaaaaaaacccaagagcagatggttttaatggaaaattctataattctatcagaccttcaaagaagacctaatatcaattcccttcaaaatattccacaaaataaaaatagaaagaatactacccaatttgttctatgaagccacaattatgcttatacctaaaccacacaaagacccaacaaagaaagagaacttcagaccaatttcccttctgaatattgatgcaaaagtagttaataagattttcacaaatcaaatccaagaacacatcaaaacaatcattcatcatgatcaagtaggcttcattccaggaatgcagagatggtccaatatatggaaatccatcaatgtatcccactgtataaacaaactcaaaaaaaaaaaaaaaagccacatgatcatctcattagatgccaagaaagcatttgacaaaatctaacacctgttcaggatgaaagtcttggaaagatcaggaatccaaggtccatacctaaacatattaaaagcaatatggcaacatcaaactaaatggagagaaacttgaagcaatcccactaaaatcagggactagacaaggctgcccattttctccctacctattcaatatagtacttgaaatcctagagccattagacaccaaatggaagtcaaagggatacaaatagaaaaggaagatgtcaaaatatcactatttgccttttccggtgatatgatattatacttaagtgatcccaaaacttccaacagaggactcactcctaaaccttataaacaacttcagcaaagtggctgaatataaaattaactcaaatatatcagtagccttccttactcaaaggataaacaggctgagaaaaaaattagggaaacaacacccttcacaatagccacaaataatataaaataccttgttgtctcaagtgatagttgattaaaatcctgtttactgaagatcaaaagttgactgtaaaagataacagggctatgaaaattgtgtttgagtatattctgtctactgtatatatgaccatgtttatatcaatagcagtacttctcttttgtaactaaaatggaaggaagatgtagttttgatttcaaaagtctattaaataatgatctcatactatggatagggcgataatataaagacatgaaaccaagataactaaattctacgtctactctgttctatactaatctacttaggagaccttgacatattcttgcctctgtctatgccacactatctcagatgcaacacaaagcggtgatttaattaattacagtatctcaggttcccagtgtaggagatgggaattctggggtgagatcaaggagtgttttcttctgatggcatgtagcttggtctccatcttataagtggcccttatcatggaaggaggcatctcattgttcccacattcagaatgtatgattccataaggctgctccatgatggtattaaccgagtcctaaatgtggctgtatcccttatggcttcttcagggtctgattactgtgtaagaggatcagaagtgcacagggaaatgctctggatcaaggggtcagtggacagtaggatggttatgactcatggaatgcagtaaagtctgaagacagagcatacagtacacgctcagtaagacaagcctttcagagtggtttttctcctttttatattttcatgatcatagagtcaactattttacccaaaactgaatgacaaggcctcaatttagcccctctgtataaacccctccagttacatttgccaatggttggttattctttttctacatcagtgccaggaagagcagtatttttactttaaaaaaaaaaggtaccaaccatcatccagcttctcattagagaaaagaaaaacacctcttacataaacccactttagaaactatgaatgtagcactgttccgcagaccattttcttctttgcctgctggctgtccatagctgctttcatgacctcctcctctcaggccctgagacctttctgtctgctggcctgcttgttgaatagcacccaccaggggcaaacagaaagtacccttgttctctctcttgtacctagacttaaattcttatcgtaccactcaaggcagtgggattgctggtggagtgggggaggatacttcatatctctagatcctagtttccctgatatgcaagacagaacttctgctttggggatttttttgtttgtttgtttgtttgaggtcagagttaggggtgagaatgtatggaggaagtctcatagtcctcccagtgacacctagtcgatgcattttccctgccctatttggtctaaagacgcctcttgactctctgaattatggtaccaccaaagtactttccaagtcactaatgagacagcaaaaggggtctgcaataatcacttgagttgcttccaatctactgaggcagttgattccatggcattctctgtcacactgtggtgctagttggtttgtatgttcattatacttctgtggcttcattgtcttctactgaatgtaccatagtagtatgcatctaaaatgagatcctgcagacctgccctcaaaccctgtctctgacattaacctactatttggcctatgtcagctcttatgtcagcttcttcatcttccaatggcagtcctatgaattaggtctctccagatctatgtagattgttcaggaccattcactcaggcttgagatgttccaaaaaggaagtccctttcgtttctttccttcctttctaagaagaagaagttatgtaaaagtaacctttattcacttgataaattgtcatctttgaggcttactgctaaatacagtcaccctttctatttctttctgaaatctggctagctggttcaactcagctgttgtggctcaaactccaagctgactgattcaatctggcttctttcagcttctcactgaattgcttggcctcaaactaactggcaatttgttatagttatttggctctttctcattctctggcttcaactgcctctgttgatgtgcagggactgaggaccaaactggactccaccgtactccctgcactgcacttactgcacccctactgcactccacttcaccatattcactgcactcaccccactccactcactgcatccccgctgcactgtactccacttcactgtactcacagcactccactgtatgcactgcactgcaccacattcagtgcactccactgtactcactgcattgaatctcactacactcaccattcccatgctgccctgcactccatccccactcactgcacccccactgcattctgctttactgtgctcattatattgcattgcactcactgtaccctcgctgtacagcactcactgcattgcaccccagtagaccccgaagcactgcactgcattgctgcactgaacagagcccaaagacactttcagtttcctgtgctgctcttaaatagctttttttcctgagagttgggcatattctatctcttcctcattctatcagatctttgtctgattcatcactttgtctgctccttaattgatcctcattgcttgggattacaggtgagtacaaaaggcatgtttgtattccagccagagggattaaagaggctcatctgtattccagatgaatcatatagacctacatctttggatgtgatccttcgcaagagcataggttctctacctagagtatgtggtttccccataatgtttagtgtctggctaatgtagaagtcctacctttaaggactaagtttcctacttgataaacataatttggtgcatttaactagtaattgcagtttgcaaattgtcatttatctgttgcctctgaagttcctctggagacaagggcattcttatccatgtttagatgtaaagaaatcagttaagagttgaaatcattttttccatatatcttaatcaatgctggggagcctggattttacacaggctattttctcagacttgaaccctactagaactcaaagacaataaaagatgaaagtgtgtcacttcctaaggaaacctgcattttcttacctgaaaatgaagtagaatctttcactccctccttaaatctgtgagaaagtctgcttttctgtcattctctaacacaaagtttgtttctctcggttcctaatctgtcattttaaccacgtgggctgggagttaaaggctgcacttgtccttggtgaggatacacttgtttcctgttgttctgcatctgtcaaaccccaactgcttatgtagctttcctatcccattgctcattgtaaatattctggagatgattcaaagtgcatagaatatagactggacaagtagatttgtgtatttgagaattagcggagagagttcacgcattccagcaccattcacgctcttgagtgtcacctggggtcacaagttgccatccttcttctgggatgaagttgtctatgagatggcactctgtgttctttcttgaacttctgcactgtggaatccctgtcagtgatcagcccttagaggagcacactccgcccttcttcatcagtgccaaggaggaaagaagacagttttcatatacagaataacaagcagtattttgggtgtgtgttttaatgagctaccaataacaaaataaaacttcagctgaagaattgacagcctggatctgtaatctgcctgacctgacaattacaggaacttattaccacgtcagcctgccagatggatctccttgaaatgtaatgtgctctacttctgaattcaacacgcacttccttttctccccctttgtgtttgttgagtttcgggaagaagcagctttacttgaactaaacccactcatttcaagtgtgtttaatgacagcaatatgtggcagataaaataaaatcctacggccttgtttgatgtttgttttaatttcagaccctagtaaaagaatacagaggagataaaccgtatggctcaaatggtggagttgaaaacaaatgatctattatcataacttagcagtttctctcccagagcatttgggaggtcaggagatctgaggagtagttataaaagttgttgaggtttacatggtagttggcaatatacagagtagttttctgttacgcggctgcagctccatgctggcttgccagaaaggcacatcctactctgactcaagtggactgagccatgtcaagtcctaattctgagtggcagagtttacctcatccctgttccagtcagtttagtgattcctcgtgtgctctgtcaggaccactcattgatcccttatgtgatgtattagtgcactttgtgaatatcctgttttttagctttattaaaacatatgtttgtatgacatcctcaatactttttacattagagtatttgaaaataaatagagaacagaaaagtctatttctcacaccccacctgttcccacaaactctactcactgaggtagtaataagtggccatttgtaatggattaatatgttcataatagacataatacatactgttgagtatgtaaaatgccgctattgtctacattctgattcactctttcccatctatctttgtcataaggaatctggatgaaagttttaatgcttgtccagaacctcttaattcaaactataatattatttaatgtatcatctttctggtgtcatcttctcctagttgtctaaaatgtaaaggggaacatcgttgcttgtctgtttctgtgtagctgtgaatttggtgttggattatagcatcaccaacagtgcagtcctccagttagctcattttatctacccaggctgctactcagtcgcatgcttgggaatgtcgtgttcagaccaatccaggcacttctctaaacagatggttgtggcaaaggaggttaccttccaaagcactgtgatcccaatagaaaaactgtctgtggaagaggggtagagcattattgtaatagttttgtttatttaaaagtcatcactccagatagaacaaggtgcttatacagtagaaatatctatcataattaaaaaatgttaatgcatcacttctatgaacaatactctgaactaattctttggtattgaagaagtgttgaacctaatcagactttaaaaatatacgcttgagatgaaacccaccttgggcttcttacggctcagcaaaagtgagctgagtcagatgacccacacttggggccacatgggtggcccaggcaagaagtgagcacaaatgagctccagcccagcaccttggcacctggacagcacgctagcctgagatgacccccacgttagcaaccaacagtcggttgctgagcaggcccatgcgacattccatgcccaagaggacccctacctggtgctataatccatagcactcctgagactactcctgaaaaaaccccagacactccagacaccactaagaggagcaagtaactggtggagaaatggaagagaaggagaaacagaaagatcttagaattggaggcttgagagcagtgaagagcagacagatgtaactaaaccctgatgccacctggaaccatagtggagttgtgacctgtgctgccaccaggattcatatccgggtccacggctttatagcagcaggagtctattaccaccaaaggccagagggacatctctgatctggtatgccaaccgagaacatgttgatgtcttagggctgtgaagaactgacctcacatttcactgcaaatcctgggagaactaggcctggggccatgtaagcaggagagctgctccttcctcctagccagctgaggtacttgagagagtcagctctacactaccccctgtccccaggaagcacagtcaagctggccctggttgtggtagttgtgagtgatttgatcccattcattggagcaggagagctagctctgcctttactgtctgtgacacaggatgggcccttcatgccatctcagggaagtagagcttgccccagtaggatgttgcatgagagctgtcaggctgaccacctcggatacctctcagtcccatatccagggctttgaattggcactttccagtgtctaccctattgatgaactcacagaatgggttgaaggatttagtcctacagatccaaaaccataagaactccatgacacggggcaacaacaggacatctgagaggcgtctcagtgagcttccagtattgccagtgtagcagaagtcagaggcctcaaaccagaccaatgactcattgcaatgaacatttgcaagcaaagaagtgtggacaaaatggtacactgtgggacacactgtgacccactacaacgtacacacaagatagttattttctattgggggggggcaggtcaggatataagggttgaaggtgagtccgaggtgagggagcaatgagtggaatgatgtgaaattacaaagaaccattaaaaagtgaaacacacacacttgaattctcagtatgaggtatcaagttctagaaagtgacctcctctcccaagccaccctgattacttcatccttctagatgtttatattggaggtaggaactctcattccatccctctatttcatattttattcactaataaatctattcattgttaaaaccatcagaaactatatgattcagaatcctgtttgtctacattttattagaataaagaaatgtttatctggtttattttagttaagtctggccagggctgtagaggtgaagatgatgttggatggtgaacatttatcgatttcctctttgtctaaagaagggaaaagaacaaagtattagagcacctggtctcatggaggtttggtataagattgaagacccaacatagccaattttgttatctcagataaacttccaaggtttccatgctgagtggtccctactggactaggatttagtaagctccctcactcctctttccttctttctattggtagttctctttattttgcttgtggagataaggaaactttccctctagggccgtctggcttcttcatactatctccagcttacccggttcaacactgttcctggttatttttctctggatacttacactcagatgccagaagcactaaggccattattttagctggttcctccccagtacaaattgggaaggtagtcctcctccaacacagtccatagttatctggtcaggttttgctgtagtctccaatccaattacttgtgactagagttcagaatcacctattacacggctgtggctatatatttatttaaataaacagtgtcccgaggttcttctcttgaatagaatcatgggtgtggaggaaactttacattttgcatgctccttcatcatagttagactccaaaattggttaaattgagtgttttgaagatttaagagtcaggtaaacaaaatactttccgaaacctacattcaatgtctcatttaataatagaaatttctgccaacttagttctttttgagctttggattttctataataaaaaggggaggacagcaaagataaatttcctctgcctttgttctctggaaaagcaagccttctggaagtgaaggccctgacagggtgtgaagagaagggaggcagtgagaagcaaggtttagagaaggcacttagagtcaagaacaggataggacagattttcttcaacagtgtattcctggacagaggaggggcacatcacagactctgattgttatttaggagactaagcaaaggaaaaggagagtctgctgcatagggaacagtgttctatgtggatcgggaaggctggtgagtgagacacccaggcagtgtagatggacacttggaaacaaggaatgcacacatctgctaaatgctggtgctgagtcccatgagaggatgtcataatcagatctgtcctgagtctcctctctttctcaatgctctgaaccaattcaaagcacgatggcactgtctctaatttaagggtaacagaaaacagtatgaaatacagatgaacaaattttagcagaatgttcattgttgtgacttcagaaaatagaacacataggtctccacctatgtttataaatagagacttcagacagatggtgtcaatgtgtaaggctgtcactatcagaaacacagggatgtggccttgagcccaaggggaaaactactgctttatttctacatatgtagccttgccttccttacagtagcacaagtgccctgaaattctctcatggcataagattgcctcttgtttattttagaatttagggaaacagagaggagcacgatataggctggagtcagtatctgcctgccaggggctgaaccgcggctgccctgtttcctctcagatctactaagaggtaattgtcacttctcctgtgaacaatgggggaagcatagacgggatgattctttattgtaaagatccaagaagtttccttctggaacttaatcatagtagtatgtgagaggacagtgtagatatctaacttcatgtaatctcttctgaaggctaaaacaaaatgggagtgtgaatataacttggggtgcagattagcccctcaggatgtgaggctggtgaagtgctgcgctctgctgagtggctctcagtggtcagagggccagggaaaggaggagttgagaagtcagggtgaagcagatcgtagacatgtttcctccttggttgtatgccttaactagctgtatagcacagagaatggacactcctagtttcctactgcttctcctcttggcctgtagatcccattactgtttagattgcacttttggtttattgcaactactgggtaactttttcatactgtctactggaaggacaatattgttagctcatcatcttttactacaaaggtcatggagcctggaagacagtatcattgtcagtcttgtcctgttcactgcagtattatgcacacatgctaaacagtctaaaggtgagtgctgttaggtagtggcaaatctatggttcttgaccaaaatagcctctaagatgagattatgatttttaagagatcacgacaggggcctgcctttccaataaaattcacatcttaatagcttctctaagggataacaaaataagttcctccttttactaatgataaaagcactgctcaaaggagcttagtggaggttcatatcctgagaccctagcaaggaagtcttttgacattttattctctctgttaagtgggaatcccatatgggtagaatatgtgcttctagacacatgcatatctggatatatgtgacaagaaaacttttgtgtccatgcgcaacattccttcaaagcggcgatatactttgaaatatgtgactcaaacacacacacacacacacacacacacacacacacacacacacacacatatatttatatatatataaaacaattttttgaaaaatggtgtgcattaccacagcaattaacacattagtgctttgattactttttaaaagctttatatataatttttatttaattaaaatataattatattgcttttcttctccttttcctcccctcaagtcctacccccatattacccatttctaaatgtaccccctattttgaccattgtttttacttttacgtgtaaatgaatacattttagatacagcctgcagagtccgttcagttttgcttgcatgtatattagaccattggtattggataatcaacaaagaggtaagcccttttctccatgtagcagttgttaattgcttggagttttcgtctagtggccggtccctgtggcttctcccattgggatgtcaattgttactcttatgtatacatgttgttaacatttcattggtccagctctgttattgctgcaagacacagtcccacatcaggcttcctggttctctgactattaaatttcaagctgttttttaaaattcttgatagtgatctttgcttttttttttttaataaaacataaaaaatccataatgtctcctcctaatttaaggaatttaaataataaaaaaataaaacatcaggtgtaaaataaagaaacattcaggcattaatgtttcaaaaggaactttctaccatacttcaagtttgttgttttttaaacatttgcttttatcaaatacatagaaatccctttactgagaagcattggctccttctcagtgtggaccgatttccttgtcacagagcgcaatttactttatgtcctgtgaaatgatggtgcacatggggcttcagagtgacaccaagggcttaggaatgaagggcctttgaaagaatctgtgtgtgagtagtgtggttgtacaatagacaggactgacttttgtcccctctggtagtaattgtataaagcatcttctgccttacattgtcagtacccaagctatctcatgtttggatgaggagacactggagtgccacaccctgctgctgcttctcagcttattgtgtgcatattctcaaggcaatgtaaaatatgcgtctcctaatgtatatgttagaattctcacatataatttagaatgccatatatctcgattttcaggcattcaggagacagttttgataagtttgagacaactctttctgatataagactattttgaaaaagtgcatcttttaaaactgccatttttttaaaaaaagtatattgctagcactttgtcttttgaactgtcaggactctaaccactgtgcagtgaatagaagtaactctgactctgactcattctaatttcccctgtttttgttacattttaaatgtacttattctgtttgctcgtgactaagtgaagtggcaaacatgaagctcagaggacaacttgtcatggcgtaccatgtctgtggcaaaagtcagactcaggctgtcaggcttggccgcatgcacaatagtcatttctcttggcaactctactcttggtgccttaatggaattcccaaaaagttgtagctctcaagctgcatgagtctcttttacatttttctaagcacaattaccatgttctcttacaaatttacctctctggtcctttatttccacatcttacaaatggagctgtttgtagatcctatctcatatggttgttaggaatattgaatatgtaatactgtgtccttattctttgaggtatctactttttatttataaattaattctgttaaatttgtgtatatgaatggtttgcctacccatatgtctgtacacaacatgtgttcctggtgcctttcgaggccagaggagtgcatcaatctcctggaactggaattacaggtggtctgtgagttgccattgggttctaggaatcaaaccctggtcaagtataagaggaacaagtgcttttaactacttagccatctcttgaaatcccagcatctactttttaatgtcagtttctgagagattgaaacgaattagataaggtagcaccatcatttctttcttcatgttaaaaacacagatgcattcatatactctcaagcatcatgtgtagtgtttgtggttcttatcacaatgcctaccacaatggagtataactgctattactggtgacgtgtaagccaccatatttatagctgaaaagcacctatacctatctttttttttattactgtactgtcaagcagatagtcttataattcctgctctttattttagaaaacctagaggactttccatagagctcacaactaaaatatctagattgtggtggtttttttttcccctgtatcttctgtactgttcacctaggtctcagatttccctggttttataatgtcacatagtattactaatatctacttgtgtttcatacttcaatgtcagttttagagtactttttaaagtttcaaaccttctaaatccaaatttctaatgctactactcctcaagtgaatattctttataccccatggaaggatttcattagtgaaatcattgtggtttgtcaactcctataattctttgtattacttcttttgacacttgctctttggaaatttcacttctgccttgaaataagacatttcacatcataccaaggcatttctgtttctcttctaatgaatataactcgctggaaagacggctcaaacattaaaagtatgggctgcttttcctgaggacacaggttgtattccccgtactcgcacgatatctcacgactgatgttaaccccagaagcagatctaatgtcctcttcttgactgcacatgcatcaaaaaggcacaccgtacacaggcataacacatacaattagaaaaattaaaacaattggtgacctatattttccacatataggctttaacaccatcatcaggacttagactttgctcatatccctactaagtttcagagattacagggtttatgttaggaggtaatgatgatgcaaaggagaaggctgcctttgatagtctattgggattagttccctccccttgaggaagcagttggagtaaatcttgtagctatacatatttgcggtattactactattttacctatggaaggacttgatataaattagtcctttgcaggaagcagaactatagttattcttgcatagtactaagcataattgggaacctggacagccaggctcaagagtagattcaaacacaaaagaagatttgagaaattaaactatagggagataatttaataactaaggcttttgtttattcgtttggttgtattttcagggtgcaatactttttacttttacttctgtaaatcaaatgagcttttaagacttgatcaatacattaaattaacaaggatttattgaggacctgccacgagctagagacattgtatgtgctagacgtaaaacccaacttgtaatggcatttacactaacaatgttctgtgccatgataaagcaagtgccgagggacagttgcagttcctttgtgttcacgttggaagctctggaaggtaaatgttggcaagctgaggaggtctttgagaagtctcttctaaaagattatggtgacgtttgtagtctggaagtatgtggaatggagaaggaagtgcttttctgggaaaaagtgtgctgagactcaaagtagttcaagatatctgtaggcctacagtagctttgtgggtagagtctgtcttccctgcgggtatgtgtgactgtgcccactatgaggtcacagaaaggactagctacaggttatatcctggtggataggtcagagagtgtgccacagttaacctagacagtgggctcatgccaagttggctcaaggttccatagttttaagcgtaagatgtgtataaaagattggtgttcccagctttttgaagaatttgaagggcttagaaaatggagtaagtggaaagaaagaatatgtctgaaagaatgcattggtgatggttcagtgcagtgcagtgactttgtgtattgtgcaccctgtcctgtaggctactggggaaagtaggggcatgcctgaagaggagcactggaacactgaaggtttgtgataacaacttagtttggattagagaggtaacttgtgatgtgcttaaactgtagaggctttgcgttgtgaatgaaaggcgaatgtgtcttccttacggacatgagccataataatccaggtagaatgtgagacaaagtcctctgatttagcacttctgcagctgaagctaacttgttcttacattaggaatacttaaataaattttccaataataccttatgtttttcaagaatgttcaatgacttttgtcagttaaatctcttgggaagaatatggtagattatcatttctcaatagtttacagttagggaaattgtaacagaaggatttaacccaaagttctgattaggtagacagatatggtctttgagccaagacagtatggctcagatggttaaacatgaattggcaactcaatatatactttaaaatactgatactctctgcatactagggaacagtgatactaggcaaaggcatatttgcacagacacacagacacacacactcagacacacatatagacacagacacacacacacacacacacacactttgcttttcaacaagtcgtgaattataatgtggtgatagattcatgctatgcttacctcattctagttataaaaacatttagaaaaatacttatttactctagttcttacaccagccctaaaggcctttatctgtagtagtcagctttgaaatgatttcagtttaatttcagttttatttttccattgctgtaatctaataaccatactaattcaagagtttactgtaatgtgaacttctgattctaatctggatgaaattagtatacctgcttcatcgtttagcgtacagaagtaagcagagtgttccgtcctttgttaggtgattaagaatatccgagtaagcatgcccaaggcctcttgagttctctccattttatggttaaggcagttaggtagagagaattcctgtgtgaccttttgcaacatttttgagattataattgtttcatttccttctttcttttcctttttccaaaaccttcttgtgctctgctccctggttcaaacttacagcctctttatgcttttgttgttcgtggtgggggtgggttttttgtgtgcatgtattcctaaatacataaataccacttgttcactttgtatgatatcaattgcatatgtatcttcagaatcctgtgtagtcttgttatgtttgttaaagtgcctcttttcgtggcttttgtttgtttgtttttagtttttctagaagccactgatatttttatatttactatctttaaaatgaaatatttgccattttaagatttaatctttaaaatttaaagtaaaataatattctccgtaaatagtagagaagcaattgcccagtatgaagattgtgtgctgcggaggtctcattggacagttggtctcaggtagggagcatcagacgggacactgaatagtcactgcagggcctgagtcgctgagcctgcttggcagcacagagatctggaacgccttaaaataaaaatcgcaaatgcaacagatttaatcaatcctagtatttttctctcttattctcccagtcctaagttaaaaataaaattcggctgccttattttcctacattctagctagtaggattagctggagctctcaacaggaaagcaatagatagagtagacaccattgtgtggtgggtgaaagcccggtagagataattacacagtcacacccactatattacccttcaaagaaactgagcctaatattctcctcctaagcaatttaaccaacttctaaaaaaaagtataagatattatttagagaatgaaatagctactgtatataatcaggagggagaattatagcaaattattacactcatttgataagtacataaagagctacattcaaagctttgtattgagcctccttggtaattgttcatttctgctaactgtcctgtacaagggcagctgtagaagagctagaaaagaagggtatgtgttacacaggttctgccctgctgcagactcagtcccatcccgtgctccacgggatgaagctcatgttggcaccagatgtcaaaagtgatgacttttctttcttttttgcatttccaaggaaaatgttcatgtctagtctcagaaaataaaagtgcaataaatttgttttactatcttgtttgcatgcacatgtgtgtatattttaggcatgattgtgacaaagctttattctctatatgtatacagcactccaaaacaccattgttttgcaaaggtaggagtgtatgtataacttcacaggataagaacatctccaaatcccccaaattgtttactcacttgaccaacaagctgtcaataatattgggggttatttatttttgattttctttaaacagaataaatacatgtataaatattgacacttcaaagattgaggagttacatttgtgtttgctatgatttttttttctccaccaagcccaacaaaaacaaaaaagttgaactaattgctattaagagaagcttcccaacataggttttaagccagatagcccttacaagctgttgttaagatgtcacatgcccatggaggaatactgtccctcactggtcagcagtgttcaacaaatgtctttatctctagatgattcatggaaaaaggcatgaaagtatggagtataagactgtattgcctacccagccagttgtgggagtgagccttggcatccttgaggcagcagagaacagtacccctcacatgcttatacttcagcaattataagctctttctctcttggagtttcttcccatttccaactgattgctannnnnnnnnnnnnnnnnnnnnnnnnnnnnnnnnnnnnnnnnnnnnnnnnnnnnnnnnnnnnnnnnnnnnnnnnnnnnnnnnnnnnnnnnnnnnnnnnnnnnnnnnnnnnnnnnnnnnnnnnnnnnnnnnnnnnnnatagtcctggtgacagagttcttgtaattgttcctgctggccttagtgacagtgttatagagaaccatagaattactgtgactcttgataaaaacttaactcaaaagactaatctctaaatgcaaagaattctttagaccaccaagaaagccacatgttgctttgtttttgcatttattcatcacaagaaagtgacatgcaatttactaaaaccaacatgagttggtttcatgtatatttcaaaccatgtctttcaacaagaatataataaaaatttaatgaagaaacagtcatgatttaaatggtactgattttgcttctagaactgtaatagctaagagtacattttatagtaagcagtgcctttcattatcactcaaatgataagttatttagtagagattaatattggtaggtacattaacaaggaaggggtttttgggccttcgactcaaagtgagtagttctacaaaaaaaagtttgggagttatcagaagtctgaagaacttgaattgtagcaatatcaatatgatttgcctcaaatatattttatatatattctactatcttgagctgaaattcttgtcagacaaatgtttatttcctttttttgttgttgtttttttttgttttgttttgttttgtttttttggttgtttttttcgagacagggtttctctgtgtatccctggttgtcctggaacttactttgtagaccaggcaggcctcgaactcagaaatctgcctgcctctgcctcctgagtgctgggacaaatgtttatttctttaccaatttttttactggattatgaaatttaacaacaggcagaagtcatgctgtaaactaaagtagggagcctgagtcagagcccaagtgactctagtcataaaagctctctacatctgcctacagcagactgcatccttttctgtcatagcttgctcatcagacattgagaaaggaccttgccacattgtctcagtagccaccatttcaaagagttgatctctgtctcaagcaaaagtacactatttggaatttgcagtggtttgggctacttatgtatagtaatttcctctttggttcacagctcattggttgcaaatatctatgtggctctgcctacccataaagatgtcaggaacctagaattatttagaatgaagcatccatagtttctaccttgttaatgttaacaataggtagcagcctaggacatttcctctacgtgtgtactatcataatgtccgaacatggctcacagaatcaactaagtagcattcatagggctcccagagaagagaggccccttggtcttgcaaattttatatgccccagtacaggggaatgctagtggcaagaagtgggagtgggtgggtaggggagcagggcgggggcagggggagtgtataggggactttcgggatagcacttgaaatgtaaatgaagaaaatatctaatacaaatttaaaaaaaaagaggggtggctccccgagagggaagcagcaatcacgaagcctgtgctggtctgtgccagatcctcttcatatatgctatggagaggatgtctgactctttagagtgttcttaggtcccttcccccttactgagttgcctcacccagccttgatgcaaggatttgtgtctatttttattttatttgttatgtgctgttcagctgatattatccttgggcagcctgctctttgctgaagggaaacagagaaggttggatctgggggagtaggacatggctaggaggtgtggagggagtgtgagtgcagtcaggatatattgaaaacaaaaacagaaaaagaaaagatattttaaaaatatctttttccatcattttaaaaatgaaataagaaatcaagaatggatgcatagtgcccttcaagcatcataatgcactacactaggcacgaagagaaaccagggtccaactaccatgcccgggagttgtacatttatgcaaagttttatgcttcactatagactatggtttttcaaaaacgactttagtaactatttgcaaatgctttgaacccccttcctacccactgcttaaaggttggggaggaaagctggtctataggacaatggaggtgtggacccatttagaagtaattctttgggtgcttcccatcttcattgttaggataccagcagtccagtttagtagtggcaggataccagcagtccagttcaaaaagtgtcaccaaatgcaattcagccgtggtggcatgttccagcattaacagccaagcctccactaagtcagcatgagtcagcaggagggaccaggagaagttctctgccatgcctctctcaataaagtgaagatcagcgaagatacaagaccaatgaagctttgcacagtaagcaatgcaagtgtcccatcactgtctgttgggtcctacttatactctcttcaaacatcacatgtcttcccatgagtctacatcatatgacacaaccagaaatttcctcttaaattcactttacaatggaccagattttgtctcaattttggtttgtttgttcatatttcaaggctggtagtcgatctagagccttagaaatgttaggcatgctactgagctgtgtctaaatatacagaggttctttttaattctttttctggccttcatttttaaccataaaaagaaacaaatacagttgaaggttttctggaaaatataacaatgagctatgtgattctcacagtcttctaagaaagtctatttgtcttgatcctagaacaaacacttaggaggttgaaatgtgtgactcttcacttgatctgagccagaggccgagaagcactaaccttgctttattctttgtctcatcctctgatcttactttatttaggacagtggtcagtggtaaagaactctcataataggtgaagctacccagatttccatttcaatgttcaatttgaaggaatttctaacacaagtaaatgtagaaagattataatgtttgcaatgacagctgaggtggcctctgtaacccttactttacggaatgtatagggtcatctgacctcttgtcaagcagagttgtggatagtgacacattccttgactctgcaagacaggactaacagagcagcagccagtgatcacctggtcacaattctgaggaagtgttgagagaaatggggagggcagtattaaagaagatctcttggctgagatagaaatgtccaatgtttcagagaagcctttgccctgagatgaaaaactgagaggatctggtcccttccaactcttctgttggaaaagggaaagccttatgttcttaatgtgcttgaaaccaccgtgctcccatctaaaaatttagtattttcttctagtgagtcaggtactaaacagatgcccagggtctacaataggtcctcagtgggcaaagaagtctctccagcccctgatgcccagaaagcttcatctcagctgtatcaaaagtaagtctgcaagcttcgttaggcccatgtagcagcttccaaaggtccctaggccacattacatcccaagctggaataaaaggcctatgtagtagctgcctgccttcctcacgaatctcttgcagcctttaattaaccagtgttcctcaagtgctttgggctccctgtttgggtagatgtgactgaaatgcaaagtacctttcctgccttatttattgctccagcgagcacgctatatgctggcagcatttatcttcattttaattttatctcccacaaatataggcattaatttaaatcacatacagaacataacagtttttatagaggcaaacttattccagcgtgctgcattttaatatcgcactttaccatcttttctcacttgatgcaagaatagtatctcttcctgcttcagcgtttaatctcaggacaacagaaactttgactgtggatattctttcttactctcaaactttatctgcctcaccgcctggctgttgctgactgcaagttgtgtgtgttttgagcactggtagaagtttcttccattctatatccctttgccttcctaattcttgatctgggggtggagagtggaggataaagggtcttacagctacaggtgagcccaccagtacttccggtaccttttctaatagtgacagacagctgagaggccccaatcctataatacatatttcaaagaagctcttgagcatcatccatgccccctctgtccttttattcaaatgagggttttctgtcttactcatcgggactcacgaagccatcttatgccacttgagtcttccctgagggaatgtgtactcggtgggctcctgtgtttgactaagaaacattctagttagctgtcataccctcagcaaggattctttccccatccttaatttgttgcttgaaaagttgcagccttcctcagttaagttctacagaactgccccaatagtcatgctgtccccagaagtcagggcctctcaggcagcaacatgagcctcagcaaagaagaccaggatttctgagcctcctcgggctctctctatccaggggccttcctcctagtaatgtgtaccaaagagaatggctaacttgttttcctttctgcaggccgttggatcgctagccttgtcttttggattgtttgctgatttttacatttagtctgcttttaaaaatgtactagcaactctggagttacctgttttattccctgttctatctcttgttcgttttgtagatgcagaaatgaggtcctgagaagtttattttccaaatcacagaggcagcacgtggcaggcctaggatgtgtggactctgtccaccctaactaatgtacttttggaaaagctcttttcagcctaaaatcttgacctcttgtttgttgctgactcttcccaagccgttcatttttgtgctctcaggtggattttatctgtggtaagaacatggttaccctggaaactcactcgctagagcagcaatccaattatagcaccatcaccagggtttattaaactagtgttgctaatgacgtagacttttgattgaaagatgctgggaattggattcttaccatgtctcaacccatgtggtatcacattaatttatacttctaatacaaacagaaaacatattctttatctgatgggtttggtttagaggctgaactgagtatatccatttggcccattggtttctgccctgtgtggagctgcctactcaggaaaagaggttgaggatcctcttttctctcctccatctgcgtctatccccagcccaaaggactaatggcactggccttgcttggatctgctgaggctacagatccctgggcagttttatttcttttcatgctttcagttgaaggttatatttgattcaggagggccatttttctctcatacactttagaccttcagagacttcccatgcaccaagaattttcttgggttcagacggataggttgactttaaattatgtgagctgaacaatcaggtctatgtggacagagttacctggtagtaccagtttgcaagaaactgcttcctgtgccaatggtttgtgagcttacacctgaagcatgtggcaggcctgaatacattgagccctttacatctctataacaaggcaacatcacctgctacctgataatggccatcaggttctattaattattcctcaccaattgtaaacatggagctagaggcaaggtcttggtaacctgcagggatattcagggatgtgtttggacatagtaaagcttgtcaatgtattgctgtccaacatctgactctcacatctcagaaaagaatcagaaacactgcctcgaagcccttgaagctgttacaggtgtccagagccattatcatcctgcacactgcatctttagcagtgatttgtgtaaaatgctgggaactgggaaaggagaagtgaggcggcctctccctgtggcctggagagtaatggtgctgtttgtcatcactgaacagacttccagacacggtatccaggttggtaaataggatcacacaccttcagagaacagtctgctttctgtgttagcattctactctccataacttgagatcctcattcaggggcttaggatgtaactccctgcctcggttcaattcccagcattccctgccagattgagagattgctaactgtctttcttatgttacccacttggcttaagttttctatctgtataatatttcgtcagcttttactttctaatacagcccatctgtaattgttgaaacttgaactaaagatttaaattctgttatttttctgattgtggcaaatcttctattacttgaatgaaatgaggactaacatgcaatacacacacacacacacaaacacacacacacacacacacacacacacatatatatatccttccttgtaaatgtctctgtggcatccgacttgtattcacatttgagtatacatgtttgtattacacaataatgtgtttaaaacatgagaaggcaatgcttactaatacttgtaagacttgggagcataggatcctttctctgtacctatacctaacgattctatattgtgccatttgccatgtgtttggttgccattctgcgtgtatagtttttatggatatatttcataaatttctaaataagtgttgtgttaatgggtgtaaaaatatgcctgagaagagcagtctatgaagaggagtttaagttcttcatgggttgattctattgcttgggacctgttatgatggcagaataatatcatagagagcacatggaaaaataactgcttgcttcatatttatgaaatgaaactagagatggagcctaaggcccagcatgcccgaaccagtgcctgctctcaagctataacctcattctgtatgctctgctgtccagtggctcgcctagcagcgccatccttaggagcgtgctgaatatatgcagtgctttgggacattctagatccaaaccatagcatattgtagatgtattaaatatgcaatttagcatatttattaattttataagaatcattatgtgtgcctttatatatatatatatatatatacccattatacacatgtatatacatatttagatatatgcagttcgtatggctatatttataaagatataaactataattttattcctctctaggtctttcccttcctctctccccaggtctctctctgcctccttacctctctactcctctctctctcctccttttccttccttcctttttctcttccttccttccttctttcctgcctgcctgcctgcctgcctgcctgccttcctgccttcctgcctgcctgcctgcctgccttcctgccttcctgccttccttccttccttcacctacccacctatctaccatccacctgtctacctatctaccgaatgacccaatcattttccaccaaccatccactcagctgcctagcagcttaaccatctatccacccattcttacacatatgcacccatctaccctttgcatgcatgcatatatccactcatctacccaaccatccatttgcccattcaggcagcattgaatgacaacctaccatgtgcttaaagnnnnnnnnnnnnnnnnnnnnnnnnnnnnnnnnnnnnnnnnnnnnnnnnnnnnnnnnnnnnnnnnnnnnnnnnnnnnnnnnnnnnnnnnnnnnnnnnnnnnnnnnnnnnnnnnnnnnnnnnnnnnnnnnnnnnnnnnnnnnnnnnnnnnnnnnnnnnnnnnnnnnnnnnnnnnnnnnnnnnnnnnnnnnnnnnnnnnnnnnnnnnnnnnnnnnnnnnnnnnnnnnnnnnnnnnnnnnnnnnnnnnnnnnnnnnnnnnnnnnnnnnnnnnnnnnnnnnnnnnnnnnnnnnnnnnnnnnnnnnnnnnnnnnnnnnnnnnnnnnnnnnnnnnnnnnnnnnnnnnnnnnnnnnnnnnnnnnnnnnnnnnnnnnnnnnnnnnnnnnnnnnnnnnnnnnnnnnnnnnnnnnnnnnnnnnnnnnnnnnnnnnnnnnnnnnnnnnnnnnnnnnnnnnnnnnnnnnnnnnnnnnnnnnnnnnnnnnnnnnnnggcttgtttcttctcagtcagggatgttgctcaccagtaccttaagctattttttcttctcattttctctaaatatcgtctatggtgtgaggtttttttttttttttttttaacttatttccttcctgggactctttctgatagatttaaatacagctcctgcagccccttcatacactttacctgctttgatcagtccatgctgcagcagtccaggctagctctgcagccacttgtagtgggtcacggtgtagcagagtataccacagctacctgagccttcaatgcctgcagcacaggttcagcattggggtatgtttgggattaagtagatgttccttccagggctcactgaagcttccattactatcatgaatgatcttccctctctctcagttccagcccagatggagtcttgacttttcataatttattcagtgacatgcacttcctgtgtctaatagtcaatcacttaccaaagggggagaggtgataagagagtaagaataattttgtcatgattcataggcacttggccttcactgagtattaccaaaaagcagacaaggcaggctctgctaaccagcattcctacatggattcttgtggcctgagcagtctctaagccatgccaaaagcatccctgaagtatttacaaggaatatatttctgtggatggggatgtactctaagcctttttgtgcagaaatatgtagaggaaagaacaaaaggaggaaaataggtaggacgcctgcatttgaaacctggttctcaccagtctcagccctaagatgtcacagcgcgctcttaaatcctttactctctttgtaagtatttcaatgcggaaaaaaaaaaagtatatttgtcaggagtctgtgatcaagaaaaaaagttgggaaaactaaagcaattaataaaaaatggaaaaaaatgtcaattagtcaggatctaattttattattctaaatattatggagtttaaaaaaaacagaaggaggtaagtgcttagctttaaaagtttttgtcaaccatagtgctactatgtagccattggctagaaaatgacaattgtgggtttttttttttaagcactgtcctgatatactgtcctgaagaatgatgctgttgaaacaaagtactgttctcaataaatttcttgtgtgtgtctgtgtgtgtgtgtatatatatatatatgtatatatatatgtatatatatgtatatataatatatattatatatatattatatataaacactatgtactcataaagttaatgtgtgtgtgtgtgttcaaaacaatttgcctgatttggggaggaattttgtttttgaacttgctcccctttgttctgtggcacttggagattcatgcccccaccttgttgaagctggtgggagatacattcctacattcttaggaggaagtcatggttctttaaaaatatctggcctatttttcttacatggtgaaaaatgttaatgtagtaggagagcatattagtcttgggacaccagtatatttgttatgatttgttttctacccaaagtcaaagatctacagaagccctcataatgtcccagaggttttgtcaaagaaatagaaccagcctgaggtatgtattgggattagctgtgaaggatatctgtggactgactaggaaaacagaagtccacacagtagggtgttaaaagcagcaggctggctgacaactggttcattcaggtcttcccagaccatcacttccttgaagccagttgattggattttaatgaaatctagatgcctccaattcctgtttggtcccagggacagtaagcaaaaaatggtgatcttccaacctgagatgaaagagaaacattgcttgtccaagagtgactgcctgttctcagtctttgtggggttggctgttgcctcttctccttagccttattcttacattctgcttttcgatgatagcaattgaactaaaagattatcttttttaaaatctttaataactttttaatttaaatagaattacctcattttcttttccctcttcttctcccaacttctcccagatagctaccctccagctactttcatgacccattatcaaattgatcacgcctttttatttgattattactcttgcatacacacacaagcatatatatgaaatcaagactatatggatacatcttgctgagtccatatattgtattttttctgtgtatagagtttcatggctaaccacttttattgaagggctcactctgcgaggtactaatcctccctctgctagcagcctatagatttagccttggtgtagaatcctttgaaagtttccctcttctacatggccattagagcccttgtcgtggtatttgactcttagagtctttctaacccctcttcctccaagttcctggagtcatagatgcaggagttgtgatgtaagtgttccacactgttatcattgttatcctatgataacattgtctcctttacttctctgaccacacagcatatagcttgctctactgtctgcatccagtccttttagagcatatcagtacccttttgatgggctcttgattattgctccctcattgctgtgtttctacccagctacagtcaacatagcctaaatcttgtaattgcttgtccatattttaactctgtactcataaagttaacatcatatgaacatcacactcctgtgtttcttccaatctatctctctctctctctctctctctctctctctctctctctttctctcccctcaacttcttgagcatgtctacctccactcaatgtctgtatttcttttcttgtccagccaggaatctgcagctctgggcttctggcccttcttctcatcctccttttgtaggcctctttcagagtttcacagcaggcctgcccagtaccaatcctgaggctccttcagtcctcagtgaccacttaaggctattacatgccacacccttcctttactttcctccttcctgagcagtcccacttaggaatcaccttagctgttcctcttgtgcctctcaaatgtgctttccctttgagtcagaacatcctttgtaaggcctattggtgacctcagctaccagtgttgtcatggtgttataggactatgctctacttcatttcttgcacttcaaatgcttcttctaagcttccccgtgtcgaaagaaagccagtctctctccagagtctgttcttatgtgttggttaacataatgtcactgactagccagctcccttagcaagacatttggataatttttctaggcttcactgtcccagacagaatctcctttcctaaatattttctgtattgcttacttctctctgtcttcaccatgggtcagagatttcagatcactgtaggctcccatggaccatgggtatatttgttacctgaaacaaaggaggaaggatttattttgccacatcacttcacagattatctgctcacagtgctgtaggcctgaactgggtcagagcatcatggcaactggaaggcatggtggggcaatgcttatcagaggaagtctgggaaggggggaggggtgcagggttgaaggacaggtcagtttccctaacaccccatgcaacctatttcttgctgctaggccctatctcttagttgtacatccagctatgaaccaaaagatcaatccttgaatcaatagcatttttgtgatcttgtcatctctcatgactggtaagctaagctttcagcacagagctttctggggtgaacactgcatatgaattgtacctttctaaagatgcaatccttataaccagttgtttatacccagctccatcctgttcatgtaccaatctgttctgcccgagcagattcctgtatgcctcctcttcactttatcttagcacaggagtacactacaataatcagggaagcagactctgaagtcaatagaacccagtttggatttcacttgtgtcctaggagtacatgaggaatagcccatagtgtctctcttaggcaggatgtctttgtggattcttcctctcctgccacaaacacactgggctatgctgtgaattcacatgctcatctctgtgcaaggaaccctggttatgccccagcctttcatggctgtcatcatagataccttaaagctgttcagcaaactcctcttcctagctcattgtcaggaccttgctgttttcttccgtatctttgctcttacacgtacgaagcactcacgttccatcttgtgggtattttctttcccgcttttaaggatcattctcacggcacccactgtaagttccaaagaacccttgcctattgaccctgctctcttgtcatatgttgtggaatgctttggccatgctaggcattagtgaatgtctgagaactgttcataacgtggctgtctcacttactgcatgtggattttcatacgctgaccacagctttcattttgtagaagaaaacaaaatataaggctcttgtttctgtggtggctccttgagtagctgctgcttctgcatggctgtttgtgcaagcaaatcaagtggcagtttacgaggagggacagccccaggccgattcccttctcttggggaactcaaaatggtatggtttgtctttcctcttcaaatcttgatctctgcaaacctagtcctttcccctaacctccatatagttgtatctcttttacatggagaaggagaattctaacctcctgcctcaggtatttacagaagtagaacttgggtaggggcgggcaagcacacgtgtgacagaagtttcagcattcatgaggagccactgtactttactgttaagcttcgggggattttttttttttaaacagttctacatggggaaagtcggttgacgatttttaaaaggaagcgtgccctttttcattagctccttttacctcatgctgagtcatggatgagagagcatttgtaggcagctgagatgcaggaagaataatcctgtcacttacacttgcaggttgttatgctttccagaaaactctttcagtgggttgcaaaagtgattaatctcccccttgaagctgacgaagaggctctctgataacaggaaattgaaggggtgggatttctttagagaacagggtactctttccagttttagattagaaaaatctattttggattggagcgagcatgtgtggggtgggggtgggggtggggagggttccgagtgtgcttgtgtgcctgcctgaatctgatcatgacctgaaaggatgaaaggaatttctggtgggatggtgcctttcgtggactggtttggctaattgttcatgttgcctttaaaccatggctttctgcatctcattctcttgtttattttacactccatgtttgagtttttacgtcatagtcccagatctcttgagaagacatcctttctaatatgagaagtagtaaagatacactgctgccttggttaaactcggtgggtcccaaaaatcaaagaaaagaccttaatctgggaagtgttctgtggtgaatagggactgtaagtcaggggtgggagtgagaatcattagaatgcattttatacagctattgaaatgtcaaagaacaaactgtattatttttcaaaagatgggctatgtttctcctgttgaataaattgtgccctcagtgagaaattttgttcctgtggtgtttctgcaacatataacttggacataagtaagtggttaatataactgaaatgcagtataccttcttagagcattaaatttttttcttcataattttgttttaaaagtcacttttcctgtgaggactagcaaacaattgcttagtcttttactggatactccattaatttacctccaacttaaaaagataattaaaaaaaaagataataaaaagaacctagcacagagcctttttgccttgggctgttttgtttgttttaaagttgggctatgttgccatgctagccaagaactcctaggcttggccgctctgttcttttccttcagactctgtggtactataggcatctgtctccatgctcatgcttggcctctggttttataaagggtctgagatttaagatgagttcctctgggttcttaacatgcatttgctctgttgcccccagagctttctgcttctcagcaggccattgtaatcgggctgtgtcaggctgccttccttccccactccctgcacccctcattctgaaggttgctcccagccagccccttgagaactgagtgcattcactcactgtgaagaggtgagggaggattttctctcaactctgtctgcactgcccctaagctcccataaagggaagacaagccaatgtccttcagcagaatggaactgctttgggaattcagggcttcttttagacctaaagttaactatccataccacttttaccctgaggcttcatatctaggttttgaattctgaagtagaaagtgtctaaaccatttacagttgaaaccttgctaattctcagtgcatagccacaaggatagagtggggaaagaaaaggagagaaaacgaatggccaagatgattgtattaaatgttttcagtgtatcatatgtaaacacattggtatatttgcatctgaatatttatataggtgtttgtactgctggcaagcaccatttaagtgacactattggacattctctgtgtccatattatgggagttgtaaggttcatatgtggtagcatctaccgtaaaggatacagtgtttgggagatggtccagttagggcaagaggaaatgtgaaggcatgtgatattttaagtagaacaaggtgattgcaaccaacaggtgtctgtatacaggtctatttaaagtttttatagcctcaatagaacaacttttataccagtaggcagtggagcgttgtcacggtattatttattattgccatggagattaactgtcttaatttaaattgcctacagtgtttttaagttggagacattttgatttgatatttttaagagagaaaggttctatacatattatggaagagcctttttcatagctaaatgccaacagcaaaatttaaaccaaaaagtactcatgaagcaatggtaacgagaaaggattgtggtttagtaaaggagaggactccctgcaaggaacagtgcttgtgccataaggatgatgtgctgctgtggagagaggtctcattaatccatagggacgactgtgcttcacccatgtgagaaaactttagggtctacatagaacacagcttgctgttgaagtcatgaatgccataatggtctacattttgaaaagtgaaacagttgttgtgagggggtcctgaaaccagcccctctctttctaacacctgtctcttaactgcctgcttagaggacgaaccacagaatgctgggcagtgtaatatatggcattcccagtttgttccctcatcctagataatttcagcaaaatagaaggagctataaatattgcaaagatagttgaatcactggaagagtggtgcacaggaggccatcgagagtaattgtttatttccattaccgtactctgtctgcaaaccagaggaccagatgctaaattctgctagataatgcatctttaattaaatattttatttgcaatacaattaataatgtgatctgttactttaaccttattaagaaattaacataattttcatataataggctcataaaaaggcaatgtgctttgaaacagcctttgctaaagcagttatgtgcattgtgcctgttgagttctgaatttagatgaattgattgtgggcaggaattacctggtacagtggactggtaactgtaaatccgaaagagatctagtattaatgttttctttagaatgagctaggcttctcagtcctccttcagaggctcagagagtaattcccatacttgctttgtgcttctgccctcctctgactctttttagaaactcagtgtaatacaaacagtgataattccaagtacacagtacactgggcgctgatgcctcctaatgaatgggaggtcatgcttctggttttgtgtcattcttgatgttgttttaatttttcgaaatgtgttaacatgataattaaatttctctagctgtcctgtgaagaaagaattttaaattgcgctacatgttgaaagaacatttagtgttaaaaaataatatctgttaaactgagatcatctgttggttcagaacaatgtctatagctatgacaatggcgctttaataaattaacatttaccaagctgtccttttaaagactgtttgaaatgtcacccccaccttcagctgaacagaaataatttgcatcagaagtgtgtgtgcccttaactcttaatgaagtaaggagtccctctcttcagagggtaattgctgtcccagtgaagtgtttatctcagcactgtcttgtgcttgcccttcctttaccctgtgatgtgtcccttaattgtatcagattagttctcgagtaaaattaaaggcagcccttaccctcacaactggtcctgctgtaattgcatagtcttcattcagtactgcagaggtgtggctgacagcatagagttgaattcccaaactctagcatatgaaccaacactatccatgtctttggacaacttgcaccaaacttgccaaactttatttctttgtagagataaaaatagggtcttgatcacctttctgtaaagtgtaaaggattttgataagacttggcatagtatgtatcctccgttgttaaagtttatcacatttgcatgttctccaaagataccttctgcttttctctgtgactctgaccacactgtgggctgaaaacaaggttccttccctcatctccagagtaggtgtgtgcacactggcaggaaaccatcccaacagatggatctcagaaagcccatcttaccttctggatagagaacaatccatctgaaactttaatatactaatggatttctctatgccacttaacattctgagttgtattttgcgggtatttaaaagtattctgtgtcacttttgttgccatataggctctcaaggccaggaatctctgtgccgaatttcccccaactccaaaactccccatacttaattataaactgttatccttatttgataaggttggaaagggctcattttatatacattcatattcttatttgatatacattcatgaatatgtgggttttattttaattttatttagtttttaattttaattgaaatataagggcatcacttcctccttctgtccttcttactctaatcatcccatgtccgagttttgtattcctgtggtttcatggtttacccttttgcattggatcttatggggataatacctaagaaacaccaattctccttcttttaagtatcataagttgcctgtagttctttgtctacaggtgaggctatgtgaggtttcccccatatacattagtatgactattagtgttgtgatttcttccattttcttcaggccaccatattgttaaggtatcatgggtatagcttgcctgtcttctctaggagacaatagcatatctcctggtcctccgacttttataatctctttgacttctcttctataattttccttgagctatagtctaacaaaaaaatctcaccatctgtcatatgaaaccttagcccaagttgttgcccatggtactccaagtgactcccagaacaatgtaggctatttttggccttggttgcctctcagaggttgaagttaagttcgttttgttgaagacaacacacacttgagccagagaacttgtaagactcagcctgtctctaactaaaagcttccttaagatcgagcttttatattaccagaaggtgctgagcaagatgctatggcaccagtgccatccagttgtgatccaccatggacagcgtggcaaagtatcctgaaaaggacagggatggtgatcttggaaatcaccaacggcagtctaattggacttagggctcacacaagaacagggcgattgtgcctgacatcagaccagtgaggtcatcagagactatcaccacttaacttgatcagcatagtccctaactacattatgaagctcaaccttatacccacaaagaagactaactctgaccctgcatcaaataatctcccctttgcagcagttggatacaaacaaacacctataactggtcaaaaacactatggaagtcatagagtgccaagcccgaagcaataacacagctcttctacttctgttattaatgtggtctcttcgtcttacgttacaacttgacttctgggtggctggtgagatgacttagagggtacagtccttgatgaataagcatgcagacctgaggttgagtccatagaacccctgtaaatagccagtcttgcacatgggcgtacaggcacatggatcctagggattatatgtagtctagctaaaatgctgcatctgagatgtgttgagagaccttaagtttcagaaagatagaggaattcatgcacagaaccatacacacacacatttgggtaagcatatttgcacatacacttacagacataatatttccccttccaaaacacacatcacagaccacattttcttggagtaggaggatacaaaataagaaatatatatagccataatttatgcagtaggtaagttactttggttgtctttcctccatagcttagctgtaaattctgcaagaaaatgacaaattacttgtttaaaggtaaatgaaagtgaatcccaacatatgtgcgaccatctttatcggaagcaacttgatagctacatttataggaatttggcttatgtacatggatactacatatacaaacagcataaaaaaaacctttcctgtagaattttgctggtaatgtttaaataagcattgcttgttattgagcaatagctatatgcttataatctaaaaatctcaagcttatatatctgtaaaaatgttgtgctctaaaatgaagttttaataccatttataaaagttgtgttttttctataacttgaaactttctctgaggcttcaagtttttttaaagaaaaaaacatacatacattaaaactattcagttcactgtaaataaatagataagcttcacaaagtattctgtgtaatgctgtattttaaaatgtagactcattgaaaagtcataactttaaagttgtgtaaaaattatttatatcacagtttgaaaggatgaaaatttttgctactttacaaagcattatcaggcttcattttctttttgttattgtagttgatattttagaggtttttttcctccatgtactatgagcaatgtctcttttcttgtacattacgcgacactgttgtacataagcaaaaacaatttctttaggtttttagtactaaaaggctcccttaattgatagtagtacctgtaataccccttatgtagctaagtatatttcaaaaggaatctgataaacatatgactgttatatgatagtatttgaaggttgtgttgctctttaatatatacatacacacagagagtgaacgagcaagagagatgttgtatattacatgtatgtgtgattgtgtgtatgtgttcatttgtgcttctgcatagtcatttagcacatccagagtgtgaagcaagagctggccactggtggggaaattcagtgggatgacaggactatggcaagctagaggactccttcacctcaggcttatggtgcatgtgtaatctcctgttactagatccttagagctgcattctgttaactagacccatggcctctaagagcatcatgtatgaagttccataccactgaaatcttgtatgtattaaacaaatgtagtttcatacctggtattgatcttctctgatatttctacttactaagtgctcagataggaattccctcaatcagacaagtcagcgtaagcttacctctaaattcttatcaggaataaaagtgttcaggttatacagacacctgtgtgttcctttgagtgaactgcctagctgtgttgttaaggcatatgcatagatactgcattgcttggatttctctcagtgaaagatactttaccagagatccgtggactactgattgtgtcatttaatttgctaacctgtatttaggcctcctcttctgtcctggaattattcctgattcctttttcccttttttttttttcttctgatgctccagcttaatatttttcttaacaaagacatttaaacatatgtgttcaacttctgtcaaatctgccacactagtggatctcatttgctctgaacctgtgcatatgaggaaataatcattgcatgatgtgaaaaatgtcagtttggatgttctcagcatctttgctatttattgccccaggttcttctcctttagcatgtcttcctttctttccttgattttctgatctttctggtgtatatgacataggactccagaggaactttctacattatagctgatgctatatacaacttcaaaagcagttgactccctgataatggatcttttaaggagagcgattattggggaagcagaaacaagaagaaagcaataccagtaataaactctgtaatacatgactgctcttagatgtttctccccaaatatcactgtttggggattagaaacccttggaaccaatattagtgggtttaatagtgaaatatttagcctgtgtctgtcttaatgtacattgggagttgatagaagtgtttctgcattgcatcagaaataaggttgatggtaatttgacattttgtaggaagtgtgttcctagcattttgatatgctattgaaccttttcattctttgtttctagaaacatccttttaagaaaaatgaaacataattcatagctctgcaaaaaatatcattatggttctcatatgcttgaaacactggaaatgattgccctagaccgaacatatctgttaatgccagttgacgtcttacttagaacaatataaatagctttttatagatataaacaacaatataacaatataaacaacttttttcaagagttgtaaaatttgtggatctattatctaatgttaaatgaaacataaaatataaaactttatataaatggggtttatatatataaacactgacatacatccctaccacacacattcatgcatacatcatacataaaaacagaagaccagagaaagtctagggggaaagatgaataaaaggttgttatcactaaagattttattgatctgtttgctggtgcttttaatagccagactgccaacattaaagtgaattttattatttaagaaaatctcaaatagaattgttttctagtctttcaatggtctttaaggagaaatcgtgtgttaagctctcccattgctctttttgctgactttttcccctggcatagtagaggaagaaattctcctgtaaagagtatggatctactatgctcctatgataccaggcatcattgggtggtcctttctcttggctttccttttcatccctgctgtggttctttttccagtccttgtagcaaacattggcatagttgttgctgtgtgtggtgcttttgtatttctgtcaagctccaggtaaagtttacctacagagaggaacaaattagagagtatcaagcaaatgaggacggaatttatgcctgagtatattcattcattttaccaattatttattcctttctctgagatgctttgatgtttaattttatctgcaccttgtgctaatgtgctgtaaggatcataaggtagaaagaagaacattggaacagggtcctactcataaatttcacagttagaataatatctcaggatttgaaagtgaaatgttcaacacataagttcttgtacttttaaaaatgtattcctcatctggtagcactgtttggggatgtatttgaatctctgagttatgggtcctggcatgccatggtaggccacagggatggtaatacctactactggttttggcctcagttgtctaccaaatgttcatcacttttggaatcccatcacattctgctgctatgggtgcacatataacatgctttctcctacacaatggatggaatcttccaaaactgtaagccaacactgtcttttctctttatgtagggtcaatgagggattctcgtcactgcaaatacaactgtaactaatacaaattccagcttttgaacatgaaactatatataaacaccccgcttaagtacacttatctgagaaacatggaggaatatgttaatgtttgaaattatttgttgtgtaaaattaagaagcatttttaattagaattttgagaaggagccaagttataagacaggagcatgcttaaagccatttgccaagtcagcatagaatggaagcctgtcctttgcttctgagttgagtgtgctttggctgagggtatctggcatgtatttagaggctaagtggcttggcctgcaagcagaccaacttctgggaatctgagacattaccattggttttctgttccttttttgaatacctgtgagctccctgaggccaagagtgacaggctgcatccctgacatttagaaggtggcagggaatggtaacccaaaaggggaattctaaagtcacataatgtatttctttgctctgtggtagttgtgctctctgaaggaaatatgtggtgatatgattggctttccctgtacctggctattttggtttttttacatatttatgataattttataataagaaaattagggaagaaaaaaacagaatgtctggatttccacttgccactgtcatgacccaaagattttgttttgttgtctttcttggtactggattttagtcatggtgtttgtacaagtttatattcttttgctttcttatgatgttatagcatataggaaataaacattttatagccagtgtagtttgaagtttgggaaagcaaattttgaaaatatagtcaaatgaggaattttttaaaaatattctctttcaaaggatcttaggtaccagaatttatctgtgataaaaggtgtccctcagaaactttaaggtatcaagaatctttcagatttaacaaatcatttatttttataaagagaaaattgaaaccctaaaattaccatgagtgcatttgtcaggctctgtattttcttagattgttccaagttaaaagtgtgtccagagacattatgtctggatttgctattgttcattattttaaaaagggatagaaaggagatgagccaattcttcatttcacctccttttctttggagaaattaaaaattgacttcaattgttcatgtccccattggtttaaactacctctcaccttgcgattgatctgttgataagggccaaatccccactccctttttctccaccacactttgttacttgggtcatggtcaacagtatggcagcataccctgctaaccatctttggattcctggataacagtgggcatcagtcatatgaagaccatgaatcatcttaattcttcaagttctgtagtatttactacagcacagagtctaaattgtcaaataggcttcatcagagaagtttcagaaaaaagaggtaaaatagccaagggggtttggaggacctttccagcaaggactggttttctgatctgttttgttgatgttgttgttgtttaagaataatgtttgtatattaccaatcatgtggtcgagtcctgtttgcctctgagattatgatgaaggcagactgattattcacacactatatacaggtagagactactactgcttgcacttttcatcaatttcttttacttcagtgattgacaggcataaaaggcccttccttccagatccttctgccctccctctcccttttcaagtcacgttacgacagacagtatctcatctacatggtcactccagggtttccacatggtcactgcaggattgcctgggcctttgctggacctgcttatttatactttactgttgtttcttctggtagacatgggaaagtgacttctttccaggatggcagatgtgcctggcgcactcttgctgaaatcatgtgtgctgtggttgagagaaaaattacggtttttccgtgattgttgaagcacagaaccatctaagtgattgtacagagtgagtgtgtgagcagttttgccacacttgctcacagtgggctttcctggcttgttttatgaggatgaaggggtgtggacaggcttgctgaatagagctcctcagtgtccctaatagtcgctctttatgaaaccattttcctcttcctcctactctgtgtcaggagtcctccttccatgggcactgtgccccctcagtctggcctttttatccatctagagcaaagggacaagacacttgtttcttagaacaaacaggttaacagaaaaacaaaacagaacaaaacaaaacaaaaacaacttactttgctattgaatatataatggagttgatagatttgatagattcaaatcatattaatacagtgatcatttttaaattagtgggtttttttttctctgtgagaaaaaaaactgaacaaatatcttgtgactctactatgagtataacatactcttttatagtttcaacaagggtctgaatatatagtgtcagtgtctgaaaattaccccctattcctcttttgctttgattttggcacccaaattcctttggaaatatgggagggggtgaggtgggtctgtttatttcctcagagcatgactactcgttcacttgcatggacatagcaactcaccctgtgcctctgattcttgataggcttccacattgctgcctgttatctgagcccagatgtctgcttttgatggaagcatatacagaacttgttgccttctttcaattgttagatggtctggtcatttaaagtgatggtagggcctttgctcttctgattctggagatgtgaggttcactatctttccatgagtcagttttgcaaaaccttattttcttaaagatccttggtagagatgtgtgaccttgaccttctgtttgcctctaatgtgtcatgctcctgtgaagaagagcatgtggtttagtcatgcacagataaattacctttatctcctccttcaggaaaacctctctctaataaactgtttccagtgaccctttcaaactctgccttcagtggctctcatggctgacctctaatacaataaaacatgcacttccagaaaaccctggagggcttgggttttccagccagaagaaaccacactgtttcatcatcttttctttgagtacactaaaatgctcagttctcttattatagaagattaagcagcatgctactgttggtttaaaaaaaattcagattgccaaattacttaccatatagagcaagaaatgcagaattcgcacagaattcatatactcagattctttaaaaattaaactgagtcacagcagtgttcattatacctaatatccttagatcaatgtctacgttgttggcctagcaaatgaggtataaggtagagaagaatttgatatagttaactaccagcagtagtttatttgattggtttctcatggaatttgtcattgatacattattgaaatgacattgaatctctaaacaggattttatagacatctgttcctaaggtcataagacagaatgctaagcttaaaggaccaagtgttgatcccctgaagtcagggagaaagtgccttttaagtaataatggcaaaagtcttggacgagggatgccctaaaggattatcctctgtgacatgagtgtattagcagagggtaccttgaccagtcatgagaaataaggattggcttccctgaagcctcattttgttccaaacctaaatgatgactaagtattctttacaggacaacattgtaggacgctgagtcccttgtcacaccagaggtaatacagcaagagcatctgtgcagatcttccagggaaagataggggtttttgcaattttctgcattcagtatatagttttgtaatatagaacaataaaaaaattcagttcctctcaaataatccatatatttggagtcagtgagatgactcctgcagccaagcataagcaacctagtttaatccaaagagcccacacggttgaaggggagtactgatttccacaagctgttctctcctcaccaagtgtaccctgtggcctgtggacacacatgcacacaatgtgggtgtggggtgacagagcaattgctattacaaataagaaatgcagatgtaaacgtgaggttatttatttccgactgttagtcactggtgatagtggaccagacttgcatatccagagattcatattgagaataaggaagagaggcacacaaaaatatcaagtacagagatctgtgtattctatcacattactgctctacaaggtatctttcttcaaacataactggttttcatatttttgtcaatgcacataaactctcctttcttcacatattcctgatccatgtcctgtctcttaagctttacagaattccccattgtctttttgtcatgatttccccagactcctctgcattttttattcacataaacaatgatctatcaatattttccagctctcctggcaaggttgccccctgaaagcatcctgctggtgttttttgctgcagctcatggaaaaatggacctttctgttctcatcctgaattggtttttttatattttcttggcctgattggagaaccatgttaggccatgggggatgaaggcgcaggtgacagaattgcttgctacccagtaggctcttttccgattagacccctagagtcttgcactctcagattgaatagacgctcctgttgatggtgctctgtcttttacatacacatgtgtgctagggacagtcgactgtacagtgtgcatatttattccagtaggatatgtggagacttcccaagttcaaactgttttgcaagttgttcaggataagtaggagccactctttaaaatgttggctctctggactagcaggatgcttgctctacaaatgtgagtatataggtctcacctgtctgtttaattatcagggaggaaaaaacgaacaatttcaagatagtacctgagtgttcccacttgattttatttctgagaaacaacgtgacgtgcatgcactggtgccatccttagtcaggggagctgcctgtcttcacagtattttatacccactcagaagtgttgtgagaattaattaaatggaaaagcttctaagaccaactgctctagagtgccacatcagaccatactgttgctgctatttctgcttcagaagttattaagaatagcccatcactagctggagtatgtgtttgcagagcacagcactgtgaaatgaacaagtgtggatgtgctgaacagaagtaggatatttatgcctgcatctctgacaggaaagctgtagaggtattgaaaggcatatatgtatgtctgatgtgtggtgtatgcgtggggactcggtgtgtgtatatgtgtgtacccgtgcacgtactttgagtattagtcctgtccccatattgggagtgatcttttgaatccagggcaccagttgaaagcacgtgatttgattctgacagaaacttttgcagttgttttaacttatcattaagaaaccagctatgaggttgctttccctgtaattcacagaacactggaaagagaggctgggcttctctcaagtgtgttgcctaaagtaaaacttgaattgattaaaatgtattaaacctttgtttttgctgggtttcttcatttattgtttttatacatggaaattaaaatgttataacggttcactattcatttttgttatgctggtttttacttcagctttatattaagcatagatttgtttatatttacagatgaaaaatatgtgttgcacggatcagatatgcggatagataacattaatattcctgatcaaaaatataataagtaattgtttcaggatttaggtatataaaatatgctatgctacctccttcagtattatacttgtttagggatagatctttcagtgcttatacgatatatcaatggtgttgtatctatagacagatgggtccattgtttcttagcttaatcttaaaatatgaaattattcccatgcttttatattttttattcactgatatattgattgattgatttatagtatagaacataaaatttactacctcaacagagttcacttcatgtataatatttagtgtaaaactccatttttggtttctccttgtttacaacaaccaagactcttgatggaaactttaagtcagaaagggaatgttggctctccagtttgcaggctagcagtcagcttgtatgatccagcagctggggcaggcatgagcttgtcagctctctacagttcaaggcttctgctgtttcctagaccctggcagggagtaccattgtcctcctgttccacttatgtacttacttctcagaggagaagaatggtttctggaactaaaaaagtcatagtctacaaaggccttttgaggcattggtggtggtggtggtggtggttttggtggtatgtgtgtttattttaatttagtcgcatttttcatcaaaaggttgtatggcttgctgttagttggtttgggttttgattgttttgtttaatcttaagacaaaggtctctttctgtaggccagacttgaccttacctcataattctttgcttgagttcactgggtttgggaatcacaggcaggcatccatcaccaatcctggctcagaagagtcttgaagacatcacactccagttgtagacaatctgggcttagctaaccccagcatgcagaatgtacatagccatagctcctgcctcggtggtaactgtcagagctgtgtatgaagtgcatttgacagatgttcacatgaagttagtgttgtataaatgcttgttataatacattgattaatttccagtgagtactttaatttctgtttactgccacacaggggaaacatggatagccacaaatggaaaacatcatgtttgtcaaatagtgtgcgacacttatcgtgaaatgtggttgaaagggcaatacaccttgtccccattgttaaacagtcaactatcagtctgtacatattttcctgtttcttgactatgtggaaatatcatcgtgtaacttcaaccgtgttgtatagatggctgatcccacagtttatttgccacggaacagttagatttgggcattttcaatgtcgttgcattccttgattgatatataatttggggagttgagctttctgctgctggttagatgtggatctttaatactttttaccaaatttccattctaaacaggatcattttggattcatgtataaacctcatgacagtcttcatatcctcttgaataaggatggatttaccagtatcactacctcccttgtcttacagtagcaatatcaattaggagtgcctgacatggagctaaattacaataaatgcctccttaattagaaaaaggagttctatttgcttgactatacatgcaatatattattttaatgtgttagttattggttactctttaatttttgtttctttattgttttgttttattttgttttaggcagggtttctccatgtagctctggctatctgggaactcgctgtctaggccagggtggctttgaactcagagttcctcctctctctgcctccatagtactgggattagaaatgtgttctaccacctaccagccttttttatatataaacatgtttttagtatgagccccaaactggcctgaaaatcactctggctcttgggttgcctctgaatttgttgtaatcctgctgcttcgactttttacctccataccccaatgaatgcatttaaaattaccctttgaactgtttccccagaacacatgaattgagaacttacatttaaaaaaccattattaaaaggaaaataaatagctcagtttgcgggcatatgccctgtgatcctagcactcagaagtctgacataagttcaaggccagcctcagctatttggtgagactcccatctaaaacaaacaaacagcacagcaaatgcttctcagaaagagaaccatgttataatttgtgtcttagaggcattagagactgagggcgccactggaattaagcatgtatccagtgtgtccatgcatttgttgtctgttctgtgaggaaaaatacaggtctgatgttgcagttttcttaaggggacaacaattcattcactgatcaatgtctttctaaatttctgctgtggactatgatattgtaaactatttagggtgtcttgttgagtaaaagtgactggcccccttcccttgagaaagcaaacacgtatacaaatgataataaagaacaggagagtttggagctgagacgaaaggatggaccatctagcgactgccatacccggggatccatcccataatcagcctccaaacgtgacaccattgcatttgacagcaagattttgctgaaaggaccctgatatagctgtctcttgtgaggctatgctggggcctggcaaacacagaagtggatgctcacagtcagctattggatggaacacagggcccccaatggaggagctagagaaagcacccaaggagctaaaggggtctgcaaccttataggtggaagaacaatgtgaactaaccagtacccctggagctcctgtctctagctgcatatgtagcagaagatggcctagtcagccatcattgggaagagaggccccttggtcttacaaattttatatgcctcagtatgggggaatgccagggccaagaagtgggagtgggtaggtagggtcttagaggacttttgggatagcatttgaaatgtaaatgaagaaaatacctaattaaaaaaataataataaaaaagagcaaaaaataaagaaagaacagaagaaatgagatatactcagagagagagagagagttcaggtcaagttattttgaacttaagaactagacagttaatctgagagaggattcgggccaacgtttctttaagaacctgatacttgtttaaccaaaatcaatgtctgaaatgtgagagaacttggtaccttggatatggatgagagcttgtatgtggcatgtcggtcagacaagaaatgaagtggcataggacattatccttactaacttcgtgaagacttttaaatgacaaagtaatgagactgtatacgtgtgagggagaaatccctccagctacagggaatgattttctaggggtggaccaaacgtctgagggagctggagaagagcaagagctttcttagtagatattgcgaaatgtggacatatctgacgtaggacactccctgagtcgtagccacattcagtgtttaaacagtaacaagggaacgtctcaccagatcaacatctgttatggaaagctttttgttttctataacatacggaaaatatgttttcctaaaaaacatataaggcattcaagtcaatagatgaaaagagtaaattgaacatgcaagtctagggttcagaatacagataaactctggagagagaaactgttaagaacttttgtgatattgatcatgtttcgagctgtagctatggacctaaagagagaaggtgcagaaaagagattatgtagcagattaagggctcatgggcagcatggtgattattttcattgttactaatttatgttaagattagataattatttgtaatgacatgaaattctgtttaatccagatatgtagatttctgtacccttagactgaataagtgataaagatgaaaacattctcaggggtagtagattaatgtctcattttcagtggttctcagctggaatggatgtacctagtgaccagggggagattggaaagtgatagtcacctattggtcatcttatttgtttgtttgtttgtttgtttgtttgtttgtttattatgaggcagggtttctctgtatagtcctgggtgtcctggaacttactctgtagaccaggctggccttgaacttaaaatctgcctgcctctgcctcccatgtgctgggattaaaggcgtgtgctaccactgcctggcttgtcatcatccttattatggggcactatcaacattgaatgagccagaagtcaacatgtctattgtaagccttaagggcacaggtagtgctccttgagaagatgtcactagctgttggccacagctcttcctctgggccactgacaggatgatgcctgggtctctctgtgttctctcctccccaactctcccttctctgtgttaaataactatgtctactcaccagtccaatccactttaaagtagaagatagttctctctgttcaggttgcaaatctcttttctgagtctggtggctcaccttccttagcctctatgtgaagcctttatggatgagttcttcaacaatacttgctcgagcatgtcccttttattgttctttggtcctgctttggggaatcctaatttaaggccatcttccccaacttatcatttgtctcaaatatattttcctgggaaacttgtaattctaaaataacaagacttaattttaacttcctaatttcattgtctgttaagttacaagattctattgaatttggaatttttgtttaattttatactgtcattttaggaggcaaacttgttatttatttttttaaaccaagcatcttggatgttgctatataggtgaagaatctctttcctttcaggctgaaggtagccatcataatttccaatagaagtgtgtgtgtgtgtgtgtgtgtgtgtgtgtgtgtgtgtgtgtgtgtgtgttttaattattaaaacacatactatacatattcatagatatatgcccagttaaataagaccttgatattatgtaacagaccacattgaaaagtaaatcaaacctagaaaaatcaattgtaacattagacaatgtaacatgtacagaggtgaaactgattgcagaagggatcagctctgctttctttgatgattcatccacaaaaaaacatagaactcacactttgaatgtctcacagactcaactatgaatgtatatagtgcctgagtaactagcctaatagaaagcactttccctatgatagctgtgaagccatgccccaggaccaatgtttaaaaccacaccatttgaaaagtgataccaacaataattgcatttagaaagtgaattagtgtagccctcacttcttagaaataattttcctcttaataagcacagatacacatacacgcacaagcacatccttgaatgatagttgttacagggctccaactccagaggcattatatccatattggaaataccattagatctctcctatatgcaaaaccccagtttcaatttttatgcacatttgcatgtatgtaggtgtaactgagggtattggtaatgtaggtaatgtagggtttcaggaaaggagttgagagggtaatagactgtgcttgacatcacagtggaaaggactcaggagttgaaggatacaaatgggaagggggagaagtgggaaaggaacaccatccaatgctgagcgtgtatggaaatgccaaatggaatccattactttgctaagcacttaaaaagaaaaccattcctaggcaagctctcccactcttcccttatttctgctgtgtgttctgttgcgtgtacactggcacgtgtttgtatatttttataagtgttgttaaaactagtatattttggtgtatacgattttcttccaaagttttacatattttatctgattggacatgaaaggaaaaagagcaggcatcattattttaaagtgtatatatttatgttcttcctagttaaggaaaactgtgccaatgcttatctggtccacatattcagttaattgaggagtcatgttgctgaatattttctgtttattggattatttgatagttccaagaatatatttttgacatttcattttattttttgattttgttggaattcttgaatttttgtcatgatttaacattttcattttgaaaatcgagcacatttaaatatcacacttatctatacatacatgtatgtgtgattttctgggagtcaaatctttttatgtgctacttttctgctgttcgttttcaagcctcttcagtgtatattaatgaagctctgttgtgctacatgggaggaaggtagatccctttaccctcggacacaagggagaatcaaggcaaataagacaagacaagggttcatctcttaatgctatctattaggagcagggcatcaccttcccttttgcttgtgtctggaaagcttcatgtttttctttctattgtgacaaaactttcactgtataacacattattgatgatagtgagcgaactgttaaacagtgagccttcacagcttatcttgcttgactgcaagcaaatcaactgaccgggaactccctatttaatattcccatttgtgctggttagttttatgtcagaaactaacataactaaaatgaagtgaaaggagggagtctcagttgacgaaaaatgcctccgtaagactatgttggaagcagacctgtagggcatcttctcaattagtgattgatggctggaggggatagcccgttgctagtattgccatccctgggctggtagtcctgggttctattaaaaagcagtctgagcaagacatgtggagcacgcacgtaaggagcatccttccatggcctctgtatcagctcctaccttgcttgagttcttgttctgactccccacgtgatggacagagtgatgtgggggtataaaccaaacaatcctcttcctccccagtttacttgggtcctagtatttcctgcaaataacagaagccctgtcctatccgctcttggccactataatcccaattcttgattttgtgagtcttaactaatttcattcaccatttcatgtaaaatatgatacttatattatatttatattgttgtaactaggttggttttttatgaactaatgtcttcagggttcattcatgttgctatatgatgtagatttccttttagaggaacaaattatattgcattgtaagcacattttctttatctgtcaccatcgatggacatctaagttctttcttgttgtaaatgtggtacagtgaagaagggaactctaatctctctttgaaatccgcagttcagtaatactggatgctaggttgtatgttctcttttaccgtattcaagaactttcccactgttcgcctttgactctgtagctttgccttcccaacaacagtgtgagacactttgctgtttttggcagtgctggtcttccaggtctccttgcttaatatcaatgattcccacaaggatacgattcctcatttggattttgtgtccatttctctattataggtgatgaggaccaatgttcttaatgttttatcttttgtatatcttctttagaaagtattattattgtcattttaaaaacctaaacttattttaaaagtatctttgttttatgtttattcttatgggcagttttctgcatatttgtgtgtgtacaagtataccctgtgtgttcctggtgtccatggatgccagtagtgggtatcagataccctggaactagagttataggtaattgggagcagcctttagcatcctaggaactaaacccgagtcctctgaatgagaaataagtgctctaaccacatagccatatctgtaggcctttttttttttgtctctgtttacttctttgttgtaaggctttcttagatctttgaggattagcccattactggacatgtgatcatctgtttctattcagtgcttgccttaacagctattcattatgatgtcataatgctcttgctgtggagagcgtttcaaaatgatgtcattgatcttgctgtgcagagcttttcaatatgaaatcattgctcttgttgtatagagcatttcagtatgatatcattgctatttccttacctctatctttttgttgttgctacattgttttgattactaaaatttacaacatatttttaaattagcaatgtaacttccctgtgttctttcttttcatgaccagtttagccaaccactgtttgtgatcttttctgtttccatttgagtctgaaatagataagtgttctatttctgcattttgataggtgtcactctagatatgaaggctgttttgaatgttctaggctcttctagtccacagacacattctccgtttacttttatttatttatgtaactcctttcatcactgtctttgttttccgtctttaggtagtttatgccttgattaagcttactcctgctgtaacagtcttgtggatgctagtacaagtgaatttgttcccttacctttttaaattcagtcgtttaccggtacggcgcagagcaactgacttttgggttagtgaacttcgtaagggaaggatcttcccttatttgtattttacaccttaatacacaagcaataattaaccatactccctatctactcattttattttcttttatttctgatcatctttgtcattttctcttctattttagggctctgctagttcaatagcctctcctccagtttctactcctgtcacaggacataagagaatggtcattccacagcagccacccctgacagcaaccaagaagtccgcaacaaaaccacagcctgcaccccaggctgcacccatcccagtgactccaattggaacactcaaaccccagcctcagccagttccagcctcctatactacggcatccacatcttcaaggcccacctttaatgtgcaagtgaagtcagctcagcccagcccacattacatggctggtccatcctctggacaaatatatggtccagggcctcgtggctataacaaccagccagttcctgtatcgggacagtgtcctcctcctccaacctgtgttggtaccgactatgcatatattccaccatctggacatccgcctgagtctggatatgggtatacctccaaccaaggacgctattatgaaccttactatgcagcaggtcctagctatgggggccgaagtgaaggtgatactgcttatgggcaacaggttcaacctaatacctggaagcgggaagctgcgtatgcccctcctgcaagcgggaatcagaaccatcctggcatgtatccagtcagtggccccaagaagacctatatcacagaccctgtttcagcgccctgtgcaccaccactgcagccaaaggtaagaaatctactaacataacaatagggaaaaggaaatgacttttctttagagagcagtcctatttgcacaggaccagtaccactactcttcagcatccagtgcagccaattgctcagtaaggaaggattttctttccaaaagctgaaaaaacactttctagaaagtctgatctaagggcggaatcaaaaataacatatcttctccccattatattttgttctttatagcaaacctttctgtgtagtgcagaaatgtcttcatatatgctgcacttgcatggaacctggatatgtttgcagtagctcaagttatgtcaggtacaagaaattccatgatctgtacaagagaggtgtctaaggccatcatatgagctattaaacattcaaagcccgtgttaaggtggtaagaattcaagcaacattggtaccacagtggctgctatggtcaaacaagtagccaaggcctccaggtacagatgtggtccagtggatctaagaggtaggctacttccctttgggaagaagcagagaccttgggacttgttcattggcccttgtttttcagatcacaaattctcgtagaagggtcttacccttcagtctttaaccctattaagaatgtttagcaatcttttgtgaatggaagttctcggtgtatatagactccttttcattgagtatgccatgactatttctgactgcataagttatactatactctgtactcatcacaactcaggttttccctactcctgagacaacacatgaattccctcagcatgaaatgaaaaaacaaacaagaatgactgtacaaagggttaaatgaggaaactgggagccttcaggccctgggttagaaccaaattcccttttccatttagtaagagctgtgaagatgccagagttcaggaacctttgtttgccctgaagcagaatggtaatttgaagtggtggattgagtagaagattagacctttctcaatcatttccaaattttgatcagattgccagttttataacagattgttctcatactcaactttggaacaacaaccaaaaaaataaagtcctttctgatatgtgctggcactggctcattggtcttagatgaaagtcactcttatatcattgtgctccaagcaattgtcatattccttaaggtctaaactttctaagtggtgcctgtgataggctagaggaatccacaaacctcagctatggcacttatatcaaagggggctaaccttgatcagttttgaatataaggcttacacacacacacacacacacacacacacacacacacacacacacactcaaggtaagtggattttgtaacatgaataaagcctcctaaaaaggaaatttcttcaagggctaagaagatggttctgtgggtaaagtctaaggaacacatctttgaatcttcaaacccactgaaaagctagctgtgcatcttggtcctcctgcagtcctaccaagaaggaagcagagaccaagagagacagcctagacagactagcaacagtataataagttccagtttagctatagagagcacatgttgagaccctgcctttatctatgaggaatgtactgtggtgtatagaaagtctgtgcccatgtaactttgctgtgtagtttaacctttcaaaacaaacacaaaacccagcttttatttggggcacagtatatacgtgcatgtagcatgcatatgtatttgcatgcatgtttccatgcttgaacatggcatgtgaggttgatttctggtgtctttctccataactgtacaccttatgtatagaggcccactagacagctaagagacattactcctagaaagagctaatatcagaatggtttgagagtgctgttctaccattgaggaatcagagaaaacaaaagtgcttctacaagcaaggcatggtttgaccctggatattataaatcccagttgtgcatttgaaactgtcgatagaaaaggctgggcccttgatccactgatgttgatgtgactttacctacctacttatgccatggaaaattttattaactactcaccagaaggtgccaaacttttgtttgcttattatttgaggaagttaattactcatcacttatttaaaaactgaactatttgtttttcaacagaatcacatattttcacatcctatgcaatttgcaaattaaaaatgaaaggccagccatgtacttctcattgtgattatgaagagggtagtttgagtttggtattcagccatgtgtctgtgctgtgggaagggaaagggactgaggagcaccgtggcatcttcagtctgtgctctgggcatctgctgatggagaatgggccctagctcagagcagaatgctgctgactctaacgcacctgtggggagaggcctttgttctcaccattgtgtctgtttggctcaaggatgtgattggaaccatcagaaatgagctcccagtgcctctctgcattcttctttaatatcctttaattggtttgaagaaaaactcgacttctttgtcacactttcagctatggtaaagaagagtgtcattttctaattaattagggaatgcaaagagttggagatttccatagcctgaataattgccgagggagagctattcactatccctgttggttttggtttgttttatttatgaagacactaatggaaaagatgcttttgcatctttaagcggtgacctttctgtacattgaggatttcagaacatttgacatttaaactactcggggggttggggggtgtttgttagtttgtgtgtttctctcctgtgttttagaccaatgattttaatttacctacactgtataccatagaaaagagaaagagaatggaagaagaaatataagagaaagaagagggaagaaagagaaataaagtcataacatggaggccgacaggtcaagattggatttgtatgtcctcacaatgtgctcagcatttagtttgcgtactacagagaccacagtgtacactctgtactaactgagcctagttccttgggaaacagttataagcaagcctttgcacagaaaaaacattcccttctcatcacaagtctgcttgaagatacactaggatctttttctccgtggtaatttatacaagcaaactttaactttgtctgtgggggcggttattttacaggtgtgtttcctgcagcattccgataaggtagcaaggattaatgcatgccaaggtcttgaaaaatgaatgccagggtcttgaagacattgtgattcttaagcatattctgataaagtgactttggcacccacttcctggtcatacctcagccctcatgtagggacagatatttgccacagtgtgtgaagacacggtgtgtgtaccctagaaacgttgtgggattcattctcctagtgtaacacatatgttaaattctaaaatcagtaatctattcaagtgactttgagatgccctccaggatgatgcagccttaaagaatgtcaaaccatccctcagctcatcttacacagagggtatagctaccagagcgcaatagactattgctttttcatttagattcagggcttgtaagatactaagtagctcagaaaggaaaagaaaaagtatggaaagaattcccagacctacaatttctataaagcataaggaaatatttcaaaatggcatagtagcattccatatatcccagtggaaacaatatgtgtacatttcttcaacttcttacagtggcatgcatgaagtgtactgcaaggaattgctggtatgctaaagagaggcatccctattgaaatccttgtgttagttgcctttccttcctaagagcaggggaacagtaaggtagcattgagagcaggcaggataggctgctaccatcagatagtgcatggtggtgagaatggagacaataacttgaggccagtgagagtcacatcagtgactcatctttgggcaccggccagtttatagtacaccttgtgactcttaggaatccatgagtattagttgaacacaggcctaagcttccctttgcctcgttcataaatcacttgccttgtatcatactgtaaactcctggaaagccgtatcaaatattctgaagattctctctgttctctgggcctgaatcttggcatctttgagtgtctgcatggcatgcgctgcatatccgtgctgtttcagatggacattccatggcctaggctatgtgcagacagcagctcacacatctatgagtgaggtcagcagctggacaggaagaggggaagtaccccttaaatcccaataaccagccttcctcttctctagcatacaggaccctaaaaaatgacacaatggccatacttcaggtttgaaagatggacttaattatatgtttagcaagcaaaagttaaaaggagagaagatgggaaaccaagtgaacaaattatcaaattaggggttcaaaatatctgacaaaaattccctggggaaacccctttaagacagccagctggagttcccagtagagagcccaggacacagctgagtgtcacagcagaaaaagaacaaatgacagtagggagagaagatcatcaaacactggcttccacacacccagcaggaatatcgcaagctaaggcaggaggctggagtaccgggggagccaggtgaagagcagtgtcccctttgattgcattcccagtccctgggccccacagagactttcttttgtagatccccttatggaaatgcttttccttctaacttttctccagaacactgacatcatgagctagttctcccatctccactactgcccccctggtcacagaggaggggcctcaggccatggcacacaaggggcctgggaatacttggccacaagcatgcttaggtctgaaactgagggcaacactggttcatttgtcactgttcttttctttgtattctcagctgcacccctaaagttgtgtttgtgtgtgtgtgtgtgtgtgtgtgtgtgtctgtctgtctgtctgtgtgttctgagacctgagttcatctcagttgtagagctctttccccatgtgttttccagctctggtggggacggggggactgggggggggtgggtaagtgttaaagggtttccctaggtatattgttgccactcttaccagggatgagggagaggagcctctgacttccgctgtggtgtcttcagtcttccggttttagccattcttatgttacttagtcctgtctcattgtggtttaaatttacatttttcttttgattactcatgtgtttaacacatgtgctggcctttcatatttatttgtcttaagcatcatcaaatattttccaattttaattgtaatatcatgtgaataaaaaagaataaatattagctcttgaagaaagagtaaatctaggtgatgacataggagtcatgaagctattgtttctatcgttttaaccttgtcacttgttcttatagttttgttgttttctttgtttgcatgttcgtagtatgatttgtaatgaaagtgtaaatatgggtctcccttctcgctgggggagctggccactggcttttgaggacaaagggagcagagatggggagcagggttcagacggccgtgaataggaccgatggacttccagagccctgtgcagtaagacagttctactgtattgttctaggaataaaatagaccagggcataggggtacaatgcaagtcgggataatatagcacctaattgtcatggagacaggaagccagagtcgccctgtgtgctgaatgatgctcctcagcacaaggccattcttcagataaggccaggcagctgtgttcaggaacgccgtgtagacaaagtcgggcagagaaagggaaaccccgctgaggcagggagccctcctttctccaccaagctcagagagtcatcttgtcattaatagcagggttcttcaacctttaaactccagtgggaagctctacaactacagacatgactgttctaactgatgctcttaaaagaactataggtccttcaccattccaaggcagcccacaccgacccacaatattaagtgttactatcaaacgccctgtgctagtaccttaagaatggtttatgaacattatttttcatctaaacgttttatgtattgcaatgttttcaaaaaactaaatgacatcagattttgtgtattgacataaaaacacatttcaaattattaattttatccacttatttcgttttaattctatgtcaaaacaaagcccttccttactgacatgcatctttggaattttgtttccttcttggccaaggtgtgtcttaatactgctcagtttcagaggcgagtcgagacgctatagttttcttcttagaaaacagaaatgtgggctggcgagatggctcagtaggtaagagcacccgacggctcttccgaaggtccggagttcaaatcccagcaaccacatggtggctcacaaccatctgtaacaagatctgacgccctcttctggagtgtctgaagacagctacagtgtacttacatataataaataaataaatcttaaaaaaaaaaaaaaaaagaaaacagaaatgtgccctttattgatcagtggagaacatataaactaaataacttaagtaaaaactattaggatttttctcacagtaagagaactttttggtgagtgagacagacaaagacagtgtcaataagacaaggtctcaccaggctggccttgaacttgcagaggttcttttgcctcagggttccaaatgctaggatttatagggggacctgctgtgcccggttaagacagctggctttagctcctgtaattccaaagtgccattgttccaagaaggaagacttactggttattttggatcattgatttttctaaaagatggaaaatccaacttttataaatactcttagcaaataatatggtgtttgctctatttcctacttggaatttaaggaatgttctttagaaaatatggtactttttcttttttttgaattaattaatttttttgatggcgagtatttaaaatttaactgtataaaattacatgtaacttttaaaaagcatcctgtatagagtgtattaagcatgtttgtgtgcagtgagcatttacagcatgctcagcatgaacttttctagtgtcttgctaaccctaaacacagaagagatgctaagtcactccctgaggcctgcccaggcttctttcctcttgaagcttgcctacattcctgggtgtctttgtttatgtaattagctcattgtacagttgtccaaacataaagtattctgtagacccagtgctttagacacttatatttagagtgagatttttgggacctaacacaatattctgtcaagatgtaaggagctgaaactgtaccctatatataaaatgaagctaacaggtcctagttttattgagttttataaatgcttgactctatctcttgtcttgtgtctatgggctatggaggagtcaaagtgtaaagtgtgtgttggaatctttgtattcttcctttattactcttcatggtccatacatgtattctttaacatcagattgaatagaattacctttggtaatgtcttaatgttccatccttaaaatatcaaagatcatcagcttactgagaaaaccctgatttttgacacaggattttgaaggtttactttggcttgttaagcatcttagcagagagatgcttccaaaacaaaacttgatcacttcaggaccaggacttgaacgagaaggaaaaaaaaaaaaagacttgggtttgacaatgcccttcagagatatgtctctgaactgaaagactttccaataggccccagcctttaaaagttccctcacccctgaatagcatcaaactaagttccaaacctataataagcagcctttaaagagcttacgtttagtaaatgtagttagtaactaatctgtcacctttagtgcttataccgattattgacactgaaccatagattgtcttatataactgtatcattagcctgttatattcaaataccaaccagttattttgtatataaatagttctttactttctaattactgaataatatctcacaggtttgctaaatcatatttaccctttaacgagttgatagcattggaagtttgcaactttctgtgtgtatttctggggcaggtctttccagctgtctggtactcatacccagcagtagaattaccttacggcctcctggagtggtttccagtggcccaacgtgtccacacaagaagtatacagagctggagagaacactcagccattaaaggctaggctcacaaccaaaaatataagaaatatacaagggccatgcttctctacactggtcaaactccatttgattttgaaaattctttactgttttagttaattcactgctttttggtgaggtcttgctatgcaactcaggtagacctcaaacttgtggtcctcctgcctctgcctcccaagcactgggcttatcgctttgatctaaatcctgttgtggggttttgtgttcaggtaaaaatgcctgttcttccagagcagggagggtatgcatgccctcttaactctgctacaatcagagcctagcatgagtcaggcactcctgaccaatcaataaggcaatcataaatgaaatggtatctattgattgtcatggattcgcgagttgctcacatggctttgtaatatacatttttaatgaatgtcctgtgttttaattgtagttctattctaggtctggttttctcctcagatcctacattgtatcctaacagattaatcttgagctggacagtctgctttagtcactgaagtgaattgcccagctctgaattattgcagtttttctgcctttagccctggttcacttgagatgttttcctcctgggctgacatgatgaaacttaattcatacttaagggtcagtatggaaatattacttcccatacttcccccagtcaagcctgcccctcctacacacagttctcaagtcttcaacacggttggcttttctcttctaaaagctcagatctgaaacctgaagccagttttcactattctttttctcattgtgtgtatatatttattccttaaaacaatagatgaaatgggcaactgctatgtactctaatgcctgtaggctgccatgccctatcacttcacctgaatcataattgattcttactccttttttacttctgtacttgtctgtttttatcccatctttccacagagtgatgttattggagccctgctagcttattgctatcttagcttcctagtgacagttagcttccctctaacagtatcccaggagtaaatataaataagcagaactgtgcttgtaagtctctgtccacttacaactctcaagatggcactctagtctgcagcagtcactttatgttcagccatgcactgaaatccaggccgtggctttgcctccgtcttcttagaaccgcatccccatttatccacatggctccttgttctgcttcatgtaggacatcactcatatggtacttagtatcatcaccccatcaataatatcccccaaagactctatccacttttactttttccttttcccctataatatttatcactgctgaatactgtttattcatgtatatatgtatgtgtatatgtgcatttgtgatgtttatatataatttatgcatatatacagtgtcatgtatatataatttctgtgtatatatacaaatgtgtgtacatgtttgtatatgtgcttgtgtatatgctggccagaggtcaaccttgggtagtggtcttcaggagatatcatattgcttttgtgtgacagtctttcgatgggtcctacggcttgcatattttgctagaatggacagctagcaagcccgcagggattctcctttcctgtcctaggcttcaccagctctcacatgccatgcttgtccaagtgtgctgagtatctaactactgtgcccaggtatgtgcagcaacgcttcactgaccgaaccatctccctggtccctgttcagtatttcaatcatttattctttgttcttttcctcagaaatgtgtcatgagagcatgatttttttggtgtttaactgctacctaggaaattgtgacttaaatatagcaagttctcaataaaaaatgtgtttctaacaaaaggataagcaagtcttgatttcaaaatcactattcctgaaagtgatttatacagacatctggcacatgtcctaacagtgtcttctgataagtgggaaaggcccgaagccctgatgtcaccttacctgatgcccacttcctagaggcgttgcctgcgttttcatgccttgtccttcactgcgagttcttgccgtaactccatgtgctgtctgcttggccttgaatttccaagacagaaacaagttgtgccctccagtttggtgacaaaatgtagaggtgctgtttattataaaatgttcttcaacgtgacaaattgttctcagactttgctgggcttaggctaaaaatagggcctgggatttttaaatgatagacaatcttgttgactgtctcgaagctctgtggattaatagctgccaatattgattgtttttgtcagacccattgctaagagcttatatggattgactcttgctatctcattaacatgctcactagatatgattttccttctcctgaatacaagactgacagagatcaagtactttacccgattgtgttttatgagctctcataaatataaacagagatgagcattaaaacaaaggtgccgatttgatcatgtgtcaagaggcacattgcaagatcgtgcctggaaaaaaatgaacatctaactgtgggttttttttttgtgtgtgtgtgtgtgtgccaggattacacaggaaatgatgaaatttctctttcagctcatattctagtcttaatattaattttattatagagagacagtaagacaatgataagcagttatccctgctctgattcatgataaactgtctagttatcctgactctcctttgcccttgaccctttgccttcttcaagtcagacagactcctggactgaatttgccttggtgatacttttcatggctgtggtgtcaggagttaaggattaaagtgacccactgagggagagtctttgaagaaatgacatttggaccaatgctgaaaggatagggtgtattagttctatgttgggaatgaaaactgtcacaggcaaaagaaacaagggtgacttcaggtcccctgggcttggcgtttacagggacagaaggagggaggtgaagctttgccattagaggagaatagagtaaaatggcggggccatgccccacccccaaccccagcactctgcacagttttcttgaggggacagtttaactgggaagggcccttagcatgcacgcagcagtgtgctcagtgagctcagactggaggttaggtggggtgaaaggaagaaaaagaaccaagttagcacaggcattttctctgcctaacttctcctcagcatggtggactgaagctatgaaactatgagctgaggaagtccttcccactcaggttgcgtttgccagatattttttgatgcatttatttaaaaaaaaaaaaagaatcccctttgtatggatttggcaagctctcaggattcgagcatctgctcacttgttccccttcctgattcatgaatggctcctcaccctagaatccccacttttgaaggaactaggtcttttctaccagagtcagatatgattgagtgtagatcatgctaagcaagaaacctgagtaccgaggggagtacctctcagggacagtgctgaagagcccccggatgtgctagggcgtttccatgggatgctctcttctactgtgggcctttggtcgctctgcaagtgtgtgtggattctacttagaccttgaatttttactttgtagcatattgagactcagggaaattagaccaaagactttacccttccttacctattacatttttactgaaaaaaaaaaagaatgaaagaaagaaaagaagaagaagaagaagcggaaactgctcactaatgtgcagtgattctgaaatcagtccacttttgacttcaggaaaccctcgtgcattaagctactgagggtccaacttaatatgacgatgatgaatgatggccaggcaggcttattagttctttgtctaacagaggacatcaggaaatccatttttcttgctcagtggttttcagccttcctaatgctgtgatccttcaatacagctccccatgttgtggtggccccaaccataaaattatttctgttgctgctttgtaactgtaatttgtctactgttatgaattgtaatgtagatatctgatatgtgattcccctccctatgaaaagggtcaccacccaaagtttgagaaccactggtctagtctgcctttaccaggcagttaagatttgtgtgttgcgtaagattggtgggttgtgggacagaggaaacagaatggcagagagaagaaagttggtggtcacctggaagcccagggcggagtactgctgagctgcagcctgtgtcctgaatcacagcatcgccaagtgagcagcaacaacttgtgacaaagccccaaatgaccacaaacacttatttttttccaaaagtataaccctgctttgtgcctttacattaatctttttgtatatttaaagaataaattataaacagatgagaaaaatgaaatgttaaaatgtggtgtgatagccagcccatttatatttgaaatttagagtcagttgagcaaaatgaatgttgcatttactaatcacatttcctattgatacaaaacaaatctgccttgaaagagaattaaataaatgattaactacccaaagccaccatttctggaacctttgaatggaacatggagttactttcctataggagaagcacgagtgagggagccttggctagggatggtggaaagtgttgggtgggaaagcgtgtatgtgcgaagctgatcacatgacaaggccgggctgcttacccttctgtggcatctctgagttctctgaaagactgctctctgagtcagacaccagcattctttccctcctcccctcgctctattatcctccctccttctctcatatttccacaaatacttattttcaaaaaaaaatagccaggtatggtattgtataagtgtaatcccattactcaggaggcagaagcagacaaatctctgaattctaggccagcttggtctccatcaagagttccaggtcagccagaactacacagtgagaccctatcccagaaagaaaaacagaggtggggggagaggcgccatctttagcaagcggagggagtcgttggtgtctgattctaatcttagcagtaagatttctgactcaagcacagacagaatcagggttgaggttttcctattcaaagatagaaccagggtggaagggataatttaattggtccagtagttgttgaaagtataaggaccaaagttcaattcccagcaccaacataaaagacaggcatggcagtgtaagcctctattcccattgctgtgcaggcagagacaggagtgggcaagccaatgtgtaactgaggcctagctgctgactctgagaggtcaagtctcagaaagtagtgtgatcagtagaggatgacacctgacattgtcctctagtttaaacacacaaatgcatgcacacaagcacattcaagcatgtttagacacatgcacacacatattaagcattcacatatacacacatatgcacacacagcagaattctatatttctcttttgattattaacaaattacatggtcctaaagaattcctggaaattgaaacatagttttctcagggaaattctagaacacaacaattatctcaaatgttatttcagtgataaactcatgacactttagattctcagacaacatgtaagtgttgaccctgtttttctaagaagccatcttgtccattcacaagcaacttgagaccctggagaatgactctccaaggcctcgcagcataggagacattgcagaataactctgaaacctcccaggttgagagagcagctaaatgttcagattggttcatcattttcattgatgaaatagctgcagattttgtgtgatatgagcttgtaccctttatgtctcttcctcttcagtgaagcttgaattgaggtgtcgtatggccaggctactataagaaataccacagcctgctggaccgttacacagcagacattcactttctcacacacctagaggttgacaagcctgagatcaaggtttttcgaatcataacttagtgcctctcaacattttcatacatattgtgactacacctttcctgaccaccttcccacacatcttagcattgcaaatgctttctgtagaaaaaaatcaaagtgacttagtgtttcttctagtaatgttgatttttaaaatgggttagtattgtcattattaaaattttgtaaaatttccttgcagaatatccaagatttattaatgccatataaaatttaagattatccttaaatgggaggaaatttctatcaagtttcttcgacttgtgaggttagaaatttataccattagcagaggtgcagaaacttgtgcattgcactctgtgtggctcacattgaatgaattatgtggtgctgtacttataactactgagcactttctaggttagaaacctgaactctttacatgtcacagacacggtcctccatgtacactctgtgaatatgcatgtaaatttgaccacagttctaatcttattctctccatcttcactctgcctgctgtctccttctgcagcatactccctctgttgggtgttacaaaacacattcttatcacatgacttttgactctatgggtcaatgaacccaatgacagcagaaccaggaatagtcaaaacagtctaggaactcatccctgtgacataagtggcagacacgaactgacatttgcattgtcagcaaaccatattaaagtagcttgttatattcagctaaatatgcctgagccagcaaaatagctcagtgaataaaagtgacttgccaccaagactggcaacctgagttcaattcctgcgacaagatggtggaaggaaaagactgattgccacaaattgttctctgatctccatgtgtgcaatttggcacatttgagtgtgttagccctctctgtgtctatctctctgtctctgtctctctgtctgcctctctctttctctcttacacacatacatatacacataaatgcacatacttagacatatgcaccaaataaaaaatacattgaaagaagaaaacacatctccgtcatgttccctattaaactcacacattcacatgaacatgtgaccaaatgcaatggaaaggccctcatggctatacttctcagcccacactcggtactttataagcaaccatagtgcccccttccccatgtttccattcctttcttgtccatccatgtctgcttaaggggtttgtgcttctctgggaacgcacttcgaagccattccttctctgactactcctccctgctcgctcttattgcttcattacacttcggaggtattttgatttttagtgcacacaatattgcataccccatttgagggctgaggcacatattctggtgttggctacagaggggagggcgtgaataatgacagtctgtgagagaggctgcagatgtcatgctcactcagctgagtggtcagagaagacttctctaggcagttccctttattctgatctaaagggagtctggatgatatcttggagacttggaagaggtgaatgctgccccacactgttgtgccagatgtcacagtacttcttgaggacttactctgcagttgtaccagtttcattctcttgtctaagacaattgcaggacaaatgagaggggacacccgtcacttgtgacacctcattgcctcgattgctatgcccctgctttcaatgcttgagaatatccagtctgatacctgttctgagggctctcttttagttctttaacaacctgaagaaacttctcccaagacttcgtgcctaagcactgagaccatagaaaagaatacttatcagccccctagtaatctcttcccattttctccctccagtgctgaccgtgcctcagaatctgtgctttttcctattccccatttgcctgatctattgactcatccaccccctcagtcagcctgtagcagagctttccctggcacggagggagggcagtctagcagtgtatctcatttgcatgcatcccaggcaagccattggctcagcattacccagtgtgaccggaaccaatagagacatttgaatatttatactttgcataattattcctgctcagaccagtctgtttgtattttaatttttatgaatgagatatatgcaactgccagcttattgaattttgagccagttagggcaggggaggacaggaatgtatagaggctccggtgtctgataatacaaggaccacccaccaatttaaacagaagccattgaggtcaaggcccactctactgttaagtacaatccattgcagtggctctgcaagtgttcccgagttgataatgtcatggtttctacagctgttctcactctagtttgatgagaaaagataagcataggcagtcttatgggtgactgtctcatcaaagtgtagtggtagagaagcaagcctgtaaccctattagcatacccctcctgtgggaatggctatctctacactgagtcattcaaaggagttatgggcaagaccatcccaatccaggtcatctacttaaatggaaaggatgctctccgtttaaacatgagatttcgtatgattttgcttcccacggtaaccttttttctgaacagcttaccccagtgatgtagatgtattaaaaccaaattagattgggtgaggaccagtacgccagcacaaagaatctgccaaccctttgacaggggcaggtatgtagagtgataaaatgtacaagtaaaaggacagaaatgtaagtgaaaaatgtaatgtgcatatcattgctgtatgtttgccgctctgtcttgcagatctatctttggtgggtgcatccttgaagatggtagactgtaacactttttctggttgctttttttattttggtcttgagcattaatttgaaggtttttgactttttttttttttttttttgacactgtttctctgtgtaacagtcctagctgtcctggcatcctggaacccactctgtagatcaggctggcctccaactcaccgaaatctgactgtctctgcctctcaaatatcttgattaaaggtgtacaccaccatgcctggccagcgtttagcctttggatcccatattttgcatggttcctcacacagcttactgactctgtggtggaaatgtcaaataagcttcctagtttgattagtctagaagagaacactacccacttcaaccacgatatagcttcagaggacctacgcaaaggctggatagaagtgctccatataaaatacatggtcatatagtccataataaaaagccagtaccaggaaacacttaatgcttcagattcagctccattttagatttgaatccattttctcaggaattcaagaggccatcctgaaatttttttagtcattcttaacattatcactgaagagataacgcttatgtacagtatgctttttatcccttactttcctgatttcgtccatggacactcatagccacttatatgctggtcgttttccttatgtggtagataaaaagcagaagatgtggagccagccatcaaagatggtgggaaaagaaatatgtggagaaattaacttttggatcatttacataagaactcctaggtgtgggagataggatagactagagcagaggcagtaatattcccttagattctgccacctcgagcagtgcttggtgctccttccacccaacctatgacatacagagcactgagtcagaaatcatctgtgtctgttgttgaaggcatcctagatccaagtgttctctctgcttaggttagagattctgagtgagttgagtccactgacaactggatggagaaagagcaagcatgtgccatctctaagcttgcaggaacagcctcatccctacactctgagctattagggaggcttggtttttcgtgctgtttctagtccattgtacgggcactataggggagtgtggttacagcggtgtcagcactgagctttgcgtttgtctctaatcccctttcattggaattgtagactataactctcataagacagcttgttctcgagagctcaccaggacgtttggttctactcttcccacaaataatgtgagaacaggctttgccagattattttgacgtgcccagacagggtgttctgaaccatgtagagttatgtgtacaagcacaagggaaatacagataattttgtatgagtatcaaagaggctctgtctctttgcagggtggggtgaggttggaaattgccccagcaaatcagcattctatttaccagatccagaagttctgtgttttgtaacttgttacagtgagaaatgagacgatatcctggggtgtggagaaatgatgtagtcttcacttgaaatgatgaacattcatttcctcatgtctctcaaaagacacaataggttcttagtaagtgttgaagtgaatgctaattcctgacttgagttcagaactaaagagatttcagtggccaggctggtgctggtggggcagagagagaaggcaggtgggggttggtgggaagagaggggacacttgtctaggatacaggaaagctacttcaagtgtggaatggggattgcataggaagttgcctttaagtgaagatcctgtttttgtttaagtggttgtttggatggctggttggttgtttgcttggtttgtttgttgggtggttgggatggtagatttgttgtgttttttaggctcagtatatcttcagagccacttgttataccgaggatctggaagagactcagaaatgaaagctgaatattttatagtgttaggaatagactgttatgctgaaaatcacagacacgcaaagaatttaagtcagacctacctctgggatacaggtatgccccttctaacttaagtcgttggcataggatgaccagccaatgcatgttgccattggctttccatgtatttcttatatgctattctattttcttctgacatgtattagtcaaaataacagaaccctgccaaggcaggagaagaaactctgacctcaaggaaagaacagaattgttttctataccataataaagactaataacagatttttagaatcacacttcccacacataaatttctgggatttgtgttattcctgagcaagtaagctatattgtggtgttcttgaagtatttgcccatactgttaacattatatatacataggcttctgctcattacagtttattctaaatgagtaatctggtgtgagttttccacaactcaaggatctccagagatgagggcatgtttgtggtgggtttgtcccagcaggtgacatctaaggaagtaattaagggccacattgctgatttgcagcacacagagctatgcctttcccttagatgagaatcagtgtggggataaaggaagactctcacagtgcagtcggtgtgacctgtttttaaataaacatcgtcatattccacagtcaattatctccaaagtacattgtgttctctagccagataagagagggggaggagagagagaggagacactgtctgttggaagtggttaaagaaaagggcacatgatttgaagtgtacattattcttttgtcctctgaataattttatataattttgaggaatggaagattatacagcattcctgtctaatttcgtaaatatcaaattgtagtctttggggagagagacgagcacaggtgggaaaacaaactgaggcatgttgtgttcaacacagagttaatagaccttgaaacaccaaaggacaaacaagtccttagttagccctactgaatggaagtggcctaatagtagcagcagtgtaagcatcccattgtattgtggcttcattatatgttctgtgagactctgctgtgccagtagcaacatcctttcttgtacgaacccagcaagggttccaattctaggaaccataaccattatttttgtttataccatacagctctcccaggagagtaaatagtgttttggcttgtatttcttttatccattctgttcttttcacttatgaaaagatcagaattgtagaaaactatgtgttggaggtataatcattaaaaagcttgggttcgatcaagctggtgttggccacaatgaggacaagtatttacatggaatcggtaatcagtgggggaatgttttgtttttatttgtctttgtgttttaccccactttgaggtaaaattggaagcaaaggaactttcagatgcccaaagtacacacagactctgttaattcacatggggaccacacagtctttcacaagagctgtgacacttggctgttctgatagaaaccttttttgtgtggcttgaggtttgaatccagagctcttccatcctcaccctctctcctaattggataccagttggggtggccttgattgttctttctccagaggcctcgtcccgtcagaagtaaaccacgcccttgctttacagcagttaaccctgatcattattgctaacactagcccatgcttccttccctattcattagccggagaagtgcttaaactaaatctgacatcactgctatcctcttagagtgttacccctgtgttataccagaaggttggctgtggaataccaatggtaaggaaccatccttctcatcataccaacccgtccgcagaaattatttatttcccattttagatactggaaagtgactcattgtgccctggaaatattatcactgtagtaattttcttatgtggctcagtttaatgttagagaaatggctagttacaaatccagacactataaagattgagctaaatattctaaaaataggatgtttggttaacgttcggtagtcaacaactttcctccagccacacacagtgcagggtgaagaaatgggatcaatgtcctcctgcagtcttcggtaaagtaactcagtaggagagtgatatgtttgaagtatgttggacccatctttgagggctgttgtgtggcatgaatcaatttttaactgaaaagattagtatctggaaggatatttcatgcttgtagttaatagatggcataaaaacctgcacctggaatttagcttgttgtaataaaattaaaatatcagaaaaaactgatgggtttttgaccactgaagatattctctagtttaggtatgaaaattagttatgaatggggaagaggaaaattgttatctcaactgcacttatttcttctaattttttttgatagagatagatgttgattgccatttaggttaagattttgtagaagaagaaatcaaaagatcagaaaattaaggtatatccagggttaatatggccgcattgtggcaaactctcctgagtttatttgctagactcttcatttttattctatttatccagagaccagaccattttagtatcttagaccgacatctcatctcttcatcctcatgatgctgtcagattccattaaataaacattacagtattaacaacaggatccagaataacctgagactagcatctttgggaatgctgggaaatatcaccttgattaggttaattgaggtgggagaaccaggaccagccctgaaagtaagaggcaccatccactgggcttggttcttgaactgcatgagagagagagagagagagagagagagagagagagagagagagagagagagagagagagggagggagggggagggggggggaggagagagatatgagtgcttgagctcagcaattctctgctccccagttgatgcagtgtgaccagctgcctcatgctcctctggctggaacttcccttctgtgatgcactgtaatctcagactgtgaactacaaaccctttctcctcttagttgttttcgtcacagtatttatcacagccatggaaaagataactaacacaggtgtccgaccttggagtcttgtcccactagcggatcatctaggaaagctgtgctatgtggcatgcgtatgttgtaaaagcctgaaaaggaattccccagatactttcattagaaaagtagtcagttgtgaattcctccaaaagaaaccagattccttaaatacattttttggtacagtattaaaagcctaggagtttataattaaagcttcaactctttatttatttccatagcttgggattctaagcatattgcagaacatatctgaactattgctccaaaccactcaaaatttgtaccaaattaagtgcttattcatgcactgggctctgtgtttacacacacacacacacacacacacacacacacacacacacacacagagagagagagagagagagagagagagagaagagaagagaagagaagagaagagaagagaagagaagaagagaagagaagaggagagagagaaaaacgcaaacagaaaatagtgccaaggcagagagagtgtttaatatttatagtaagataggatactcttactaggtatatatagaggaaaagttccaatttgatttttgagcaaatggaagccaggagaggagaataaaaattcaccttcatggttggcaagaatgaaaggtgtaggtaccagaaaaggctctggtcaaagaggactatggaaaattgattaacaaatcccaccttgcagaagacaatgtgttacaagactcacatgttctatagagatttggagagggtgggcctctgaacacagaaatgacttacgctgggaattaacattcttctaggtttggtggaaccactgaacttagtggcttctcggtgtaacaaagcattctcaactctgctagcatataccttaacaaaagttcagtcatctccccgggagtattttatattttattccaagttgatacttcttaaatgtttctaaaatagaatttgtggttgagcattgcaaaatgctatatatgtataatgtggaataaaaaattttcagagttttgttatgagaaaggaatcataaaggaaactttctatgctcagtgaaaatagtaagctattgagcacatttataactcagtaagtgatagttctcttgaaccttatgctcagtggaagtagccattactaggtaactattagtttatgggatttaaaattaccatggaaacaaggcctgtgggcttctctgtgaggaactttctagataaggtaaatggaggctgaaagacccatcctaattgtgggcagcagtattgcaataggctggtcctggattgagcaagaaggagcaggcagcacaaacatgctcagttcctgatttagaataaaatgtgaccaactgtctgtagctctagctgtcaggactgcccaccaagatggactgtaccctcaaactgtaccaaaagaagcccttctcccttgagtagcttttgtcaggataccttactacagcgttaggaagtggtaaatacagaacaggaacagagaaaggtcaaaaacatttcagttagacagtactgggttcaaaatatgactgtgctttctattaactatgtacctctgagttgaccaactctcttaatttcagctttcatatttgcaaaaggatagagtggcaccttcagaatggaatatagtaaagaataaacaataaatatatttacacacaaaatccactactggcaagtagtgtagcatgtgcagtggttcctttaatgctccgaacatcatcctaaaactcgtggtgtgatacccagtgtcttccaaagcaaaccactccagccttagacgtttaggtttagaacttccccctaaagcacagtggaatagtaaagaaaaaaaaaaaaaagaaagaaagaaagaaaggaaaagaaaagaaaagaagataccattttctgtatgactttctttagaaatatttcagaagaaattttcaaatccttgcagtctttgcctcacttacatggccattccacagcatcatctattttccattgacagttctgagagccatatgtactcaatggctctccccttgacttgtggctttaccagttcagcaagttgaagtttactaggagccaagtcccaataggatctgagccttagaagcacagtgacatctttgctaacttgcactgtgcgtgctgtgctttgaaatggaaagcttattgcccttccttgcttgtccatgagaaaatatttgtagaacaccccatttagaagaaaaatggtttatacattctcttcctgataggattaggagtctgatcttgccctgtcagttcttggccccacctgccaaggagaagaaggagaaggggaggggccttggaggaagaattgtgggagggggtgacaggaggggtagctgagcaagatgtaaagtaaataagtaaaaatactaaattaaaagtaaataaaagaaagaagagattaaaaatgacttgcaaagaatacttaaaataatttatattggattaatgaatgtaaactcaagtaaatttgtaggaaaatgttttatgacattttggctgtgatgaaattaaagttaaggtagcctacgataccttctgagttttacattatatgcagggcccactttaatccagaacaatttctttcttgatatcaggtttgttgcccaaagtaagtagtatgggtaggatatggtactgcgcttggtcagtgatccaagcatcaagtctttcctcagtttccctcaaggtttcacctaagatgtgtcagttgcttgcctgcagtagtgatatcatacaaaaccaatcctagagttatatatactgaaagaatcctggggactacaaatacagtcctacaggctagcccttcaaaaatcaaaaatactaataatattttttaattgattatatggggtcatataaatttacttgatctaatctataactttgtgaatggcttaaggcagagttgctatagtctcagtttcactagtgagcctactgacctggggaattaaaactgtgcatgaaagtaaagatgtccaagtagccttatctctggtaacctggcttgtttcgagcaatcacaaaatcgttatcttacacatttagcgagcagaagcaccgggctgcctagaaacagaagccttactacatctgaaatctcccttagccagctccttctctaatgccccatttgataaagccccaaaatgaacaaaatgttgtctcccacaaacccagaaaatcattacaaagctgtgatggtttgaataccatattctctgccatttgaatccttggtccaccattgggggtgacatttggggtgtataggagatatggtcttgttggaggaagtattcacaggaggtggagcttaaagtctggtaccctttcttaagtattctctctgcctcctactttcttttggagatgaagctctcagatgcttcagccattatgctagctgttagctgccatgctgccccgcatgatttggttgactctaatcccgctggaagcctgaataaaccattccttctacaaggtgcttcagtcatggtattttatcactgcaatagcatagtacctaatacagaaactatagaataatccaccagacccattattgtttttaaattacttcagtctcagttcagatctcctctctgcatcctgtgctattgtgtgtgactcagtccttcccctccctggatctcacagtgagtatcatgtgcctatctgggtattgacatctattaaaccaagacatcatgttagtgtctctcttaatgcttgtcctttagtggatcttcaacaaatattgatgtttttcatgcatttgccttccctgtcatacaaccagaactctagtttcatactgtttacttctgggctccctaatgctgatccactctttagcagagggcagtagagttgaaaacaggcctttgccatccatctgtctccatgttgatatctccagtcctgtcctatgaatgataaagcttaccttgggatggcactagtagtccccatacagtgcttactatacatacatggtccctggcacaattatctaaggggcttgacattgtgtctatcagtccaattgcaaaataggacttattaatgaatcttttattaacaatagattatttcccacaacgaactattcatcagaaacgaagattaattctctcactctcttcctcctgccctttgttgggtttggtttgatttactgtgtttctatctcaggacatggtcagtactgatgccattccaagcttatgagacactttccctgcctccttagactctttggacacctttaggtgtcaacaaaaggggtgtagatgtgagacagggaggcattcacattagtcctggttactatggggaccacagagcaggcatcacatccatcctgtccacacaggattaactcagaccatctgagccctgagtttacctcaaacacattccttcaagaaaagggtcactgccggtcatttccctaaaatatcactgctgtcctgacctgatccttctcagcttcgctttggatacacaagcatactttccacttgtcataaagtgtcactgttttataattaagcatgaggtggcaccaggtgaagggactgtgtaatgtggtcagcacacagagcctgtggtcaaagataggagtgcagttgtcatttggtattttggagtctcaatgttttgatttgtacgtctgttataaatatatcacatctttttccttctgctgtggtgaggttcaaaagctagactcatgaggaaattctctgtggaccataacttataagataaatagggaaacatttattgaaccttccttgtggttctgtgcattatagtagcttttggtctagatacatggtatataggtgatgttaaaataaaattgacttaaaaatctccggaataatccagagctactagtgtgatcttgggttttataggctgtgcaaaagatgacttttttagatccctacctatatgtataaaggattctgcctaattcacataagtgactccagaattcccagagaacccaggtgaaccctgcttctgatatctttctttcgaatgatactcactcaccaagggaactcaatggggacctttgagattttcacttatggcgagaaatcagctttctcctttggccatggcagctagagccctttccactgcgctcttgtttttcttatctcccacttagcatacccctgtgtcttgagttcatgatcctgtaatgagttctcatttggtattggggaatatctctattctgtatggacactggtgttcaagcccagagaggtttccacttggaaaggatctgatataggaagtgtatttttcttctactttcttggtggccagcttggaccagtgagttgctaggctgtcctggtttcttggcttttggagccaaactaagttgtacatgtcaagacaattttcttcttcttgataaaggtctttccttttttttctctagtgcctcaaaagaaggaagggtaacttgatcaattctaatggctggcaagtgaagtatgccataaaatgttttctatcacttgtgttatcttgtttaagtcttattgtcattgtcactttgaactgaatggaagaatgttctgtttataccaaggatatttcatattcagtgtcagttcaacaacgggcatctcacttgcaagaaaagccagacctgaggaactaattttatgtttctcaaaaccttcaaattgaaatcgcttcaagttcccaaagtataatgctctgatggtggcattcatgggatggtgcttgccactgctatactgtaactacttaaatacggcatgtgagtgtgtgtgtgtgtgtgtgtgtgtgtgtgtgtgtgtgtgtatgtgtgtccttatagcatagggctaggactgtttgttagaggggcttccaggtttagcatgataattttacatctgtggttcagtgtttctttagttttagcacttaaaatcaggccggtcttcatttcagcttccaaaaagacagggctctaccctgttggtacccagagtccctgaagtaaaactcatgctgctgtggaaagtaatagccatagataaagttgtggtctggatacaaaccatctcttcagcgctgagctgaaagcaaagcacttaataaccccttgtctggcatccccagtgttgcagtcttcaagacaatatgaagtttccactctatcaaggcttctagttagccactcacgaaatttaaacagaacagcagggaatggagaggagtagaggagatgagatgagacagacaggaaagagaagagaaacagagaaatcaaccataatttctgactggaatatgattcctgtcttctaatgttcacaaggagtaaatggagagagagagagagatgtaaaatcgacttccaatgccttgtaccaactttttttttacagcatttttttaatttgttaattttttttaaagatttatttatttattatatgtaagtacactgtagctgtcttcagacactccagaagagggagtcaaatctcattgtgggtggttgtgagccaccatgtggttgctgggatttgaactccggaccttcggaagagcagttgggtgctcttacccgctgagccatctcaccagcccttgtaccaacttttataaaaactcagtgctaaagaaacctgtagacggcctgcatgagatgtttctcaaggacctgacctcatgcatacatcacgctgtttcacggcaggtcaccttccatactactttgcttaagtgccttatacttaagttgtagattgcttccctaccatcttatgtataaaaaacaaaaaacaaaaacaaaattagaaaaacagcaaataatctaaacctgtcaaatgagattagaagacagcatcctgtatgccaaattgagcttacgatagtgactatagacacagctgtactggagtgcagccacaatcctttgtttatgggttgtttagagttgatctttctacattcagagctgagtagttgtaaaaggttagatggcccagaactcctatagtattaactgttttttatctctcatttaaaagagtttactagtctttgagtactactaatcagtgaataccaagggaaaattttgttgtcaatcatatttccaatctatatgatgtgtagttcttaatctttcaataaaatttagggggaaaaaaaaggtaaccacccagaagacattcatacagtaccttagctaaaggatgataaagagcgtgtaccatcccctcctctccagttagcttttcctacagacatcccgtgccttagcgtaagatgctaggatgttgagacaaggccacacaatgtacatctagaaggttccttgcctctcgtaaaggtggactgcacgttagtaatgctccttcatcccgtgccaggacctaaagtaaagaggcagaatagaggcaggctccagtgtgcactgtgagctctaggaaacatttcacaggaaacagaataaacctctgtcgatgggcagtattagaaacaaatgtttgatgtcaaggcacttcatatgtctatattaaaataatttggcatggaatattgggttcacagtaaatgaagtactgttgagacatttctttttgtcttttcagtagagttctcttgtaagtaatcattatgcccattttattaagagaatgttttgttcttggcagttgtttgatttgctcaaagttttggtgcatataaagagagaaactagccctccaaaggtatagaactgtctctggtcaaaatctcctggcctcaatctacagatatccctttgacattgaaatgagtcttcagtatgataaaggcctttgactttgactgtctagttttaaatggtcccttgatttcttaattttttcacctgatgccacagcgctttctcctggctgagttaacattagtcttgatgtcaacagttttactgcttactctccgcccttgttactatcataagactttggctgtaactgtcagctgatttctgtacttttccttttcttattgctgttatactaacccattggaccctcggctactggttacatctcctcattgcagtttttctcccatagtagaacttacataagagggggagaaggtttcagtgctaacatttcctaatgtgtaaaaaaggacaagaaacagagcccaagccacaccattgactgagactgagagccatagtgttgagtgtttaggcctccaccttgcaggcttgctagccacttgcatactgccgggtgtattttccacctagatgagctgtcttctttattgcagatccccaaatcaggctttttacccatcccgaagcctctgttttgccttagttctctgacatgggtcctacaaacttccagctgtggtttggaagtgtgccacctttcctagtacccttaaggcagctaggggaaggactgattgggctgcctataattaattccacagccctgagtgtggtctagagaaagtaaggtggggatttcagctgtttgttagtaagacaggagagttcagaggctgtgagattctgattcctcggagattctgcaataacgattctgttcatctggctttattctttttttttttaattaggtattttcctcatttacatttccaatgctatccttaaaagtcccctatgccctctccccccccccccactcccctacccacttcttggccctggcgttcccctgtactgaggcatatacagtttgcccaaccaatgggcctctctttccactgatggccgactaggccatcttctgatacatatgcagctagagacacgagctgcgcggggtactggttagttcataatgttgttccacctataggattgcagatccctttagttcctagggtactttctctagctcctccattggggccctgcgatccatccaatagctgactgtgagcatccacttctgtgtttgcttcattcttttctgaacctagagcacctctcttaacctcggtgggtctcaaatatgacaggattatacatggcttttcttcactcggctgttgtgaggatcaaataggcacatgttcaagcatttagaaccatttctaactgtaaactttagttattatcattattatcgctttcctcttgtgattgaacttgtcataccatgtctctattttgggttctaaaaacatggttaacataattatgggtttaatagaattttggattaacttgtgaacccaacatccaattatagtgctgtttttatgagaggatgaattcccaagttcattccaagcagatgagttttaaggaatgtcttagagctggcctgagtcgatgagatggataaagaaaggaaattgaacatctgatgatgtgtattgtttaattgattattttatagtttcatacaacatgataaaatatattgatcacgtttaccctaactcttccaagatctatctttacctccctatctgttgtcaacttcatgttttttgtatttaatactcccatttcactctaatctgtgctgcccgtttaatgggaccttccatggggcatgctcagccttccagaaccacacccttaaggaaaactgactcttcctctccacatgcccgccctcctcattagggttggggcttgtgaacccttcagcatctcatgctacgttggctaggtcttgtgtacattttatacaggcaaatatagcacccatgagcaatgagtgcagtggtgtgttgtatccagaagacactttattactctgatattttatacttactgtggtgccagtgattggacctggggcctcatgcatgctaggcaagtttgggacagttcagctctaccgccagccccattcaaagagaattcattttactctgcagtcacgtcacgttcatgggcatctccttgtatttgggtaatgtttagtctcttttactctgtagtccagggtgacctggaattactaggtagcacaggctgtcttaaaccttacagtactgtgttagagcaaacagagcctcatcttatgaatcctgaacatgtaagctattgaggttatgtatataagctttactcacttaatatgtgttgtcaatttatcttgttattgctttctttcatttggcactgtctgtgtgttcatgagtaaagctggccatatttaattgcctgggttgcatcagtagttgtccaccttcatcattgcttggttctgtaataccacgaaggattactatgccagctcccagtcatatcagtaagcttgatctgcatacagtaatttcactgtttgtgaaatgtctgacctcagttttctacttctaagtaaaagtcatggaagttttttctgatgacttaatcatacctggaacacgaagagcaccatagttaatgtaaaaaataaatccaaaatgtatgggcactgatttgcaaatctgtttacaaatgtgtggagaaaggagagagtatgaagggctgtgagaaagaacagtgccctctaggacccgagaggggattctgaaaggctgtgctgctgactcggccttcaggtctcctaacaggattcaaaggggacattcatggcagaggagataatgagaagacagggagtgtgggagttatagagatttattctgtttgtttgttagaatgccttaaaatggtatatgttactgatttagccatattttacttcaagattcccacatactttctggtgaaaaatcaacaaaatccttaaaattcagatgattaaactctttctggctgagttgtgtgtctgtgtgtgtacacatataccccacatgtcttcacaaatcaataacaatgccaaatggagcaattttccacaattttcctcaaacgactgggtacttaaacactgcgttcaaccaaatgatgaagtccatcagtgtctcccgtcctgctgagctgctgcatcgtggcctggagaagagactgactcttctgggctgcgctgttgaagactgtagactgtacttcacctgtgtagacagatacccgcacaaataacttttctgtcaccacagcctttgctaagtgttgtgagtcgggaattagaaaatagttccaatttgagttctcccagcagagagaaagcattttaagcaatcttccctggaatgctcaggtttgagactggaagagcttagtccaatcattgcatgaggtggggcaacctgtggagggaaaactgcaaaaagtacataatttatgtatgaaaaaacttcatatatacagaaaacaaaaaggcaatgattataaatcacataaaggcagctgtgtctttgggaagctaactggcaactgaagatacataatgcacaactcttaggatgtttcctctgagtgaagactgggatggtctgctccattagtgaaggggccacacacatttttcatgcccgtgaatcagtataggtccccatccaccccattctgtttttagtctcagaatctaaagctgcctagagcagaatgtcccaaacctagcaccacatagctccagagtttgcttcataggtgctgttgggtttcaaatgggagggggggggttcacaaagtatagaatgaccctgcctagctttgaggactatatgaagcataagcaaagcacacaaatgtgttatgcatgtgtgcacacatctacatacatgcacatacacacacatgaacacacccataatttttaagaacacaaggtggtgaatttgaaagagagcaatgtgttgatacataggaagatgtgaaggtagaaaacaaaaagagaagtgttgtaattatattataatttcaaaaattaaaaacttattttaaagattccagataagccaagcaaaggtggctcacacctttaatcccagcactcaggaggcagaggcaggtggctctctgtgagttcaaggagagctggatctacagagtgagcttaagacagccaagcctacacagagaaccctgtcttgaaaaattattgcagagagttgtgcaagtggagaataagaaccacagtataataaagtgcatcaagacacgtaggagcagctcagtgacagaagtcccagcattcacttttctgaaagactccattgctttgaaagcagtgtgttcttcttcccggagtggctggaacattacagtgatgactcctgttatgaaatgaacgggacttgtaggctatatgcttcaccatggagattatttcatctttaaaattctaaaattatagtaatgcacataagtgcttcctgaaggagagaatatatctactgggtattagggaaaactatttgtccatccaaaagataagtgacttaatccagtgttttgaatttttcagtattatattcatctttgaatagtgactttattctggtacaaatagcaagcaatgaaaatcttctatctatagaactcttggacttttaagatggcccaagaatgctttggttgcaaacactaagtcctgcggacatgctatacacagacctccttacacattctgcattttgatactggctatcttgattgtgtgacagccaatggttattctctaaagtagatctccaaactgtgaaataattgcaaagcaaacccccagatcagagatcagtttgggtagctgggatggggtagggaaagcaaatagttaaatgtataaacacagtactggaaaagccagtggcaaccattttgtctacctgccagggcctcaaggcaaagctgtcagttttgaaaaattgcaagcaagtgacactagtcagtatccttaaactgccaacaggtgaattatttcttgtgactaaatctggaggggctctggaaccctcactcttgatgtggctttcccactctctaaatgttgggaaaatcagccttgttttctccatgtgaaatgaagaggttaggaaagctacttgcttaagcaagtgacagtgcataataccaagcaagagcactgtgcagtcttctgtagtattctgctggggccggggttcccagccacctggagaaatagaagttacaggagaacgcacctcatcacaagagcaggctttatgaagtaaggatacaaatccaaacttcctagtctcctgtgctctctagtacacggtcctgcaccttgccactcactcagtgcctctgaaaaggggatcctgtatttgctttgtcaggaatacctgatccctcctttctcacagggctttccaaataaagtccacactgccctactttttccatgaatatttggcaagccttctggtattttgttaactactgaattgtttggggatttttaattgtttgaggctaccatatcaagtattcctctgttcaagcattccctcccctttcacttccagtgtgcatgttcttcctaatactgtagccttgtgaaaatgcccaagaactaccaaagtctggatcctgagaagcaggggggtagagactgctcattccagctgttgcgcttagatctgggtgactatcctgccagctgttgtcacagctctttcgctgttacacttggatttctttgctattataaatcattgattgttgatgggtatcagctgacattgcccccagtttcacacactttgtattctgttttcatcttgattttgccactttgctttacatcagcctatctaatagtagctccttttgcatgtagaatcatgcctgtcttctggaggaggctctcgccttggcagaattttatcctgatattcattccttcacaattggaacagttcacccattccaaaagaaggccttgtctctattttctttatcttattgtatgtttctttctgcttctaataaattgttgttatatagggacaccttaaaagaaaggaaggaaggaaggaaggaaggaaggaaggaaggaaggaagaaagaaagaaagaaagaaagaaagaaagaaagaaagaaagaaggaaagaaagaaagaaaagcctaagttaactcatccaaacttctgcagattcctctagatggaaatgacagtgtctgccttgcatgccacagaactctttctctctctgccacacaggcatcgtttcccattctgcacatgggaagaagcacagtgtaagcatggctatatgcagtctctgtgtctttattaaccttgaccatcccagggtttctgaagtatttgcttgttaatcaacacagtgacagtagtgacgaataaggaaccagtgtccctgtcactttgccatcaatgagtgctccatatttctcaagctgtttcctaattaaagtaatgtgtgtttctgccgtacaaggtcaatagaaataaataatacagaacaaacatcgcaccttcgcttccgcttctgcgccactcactaattcctagttcatgaaggacactcttagttacaattccctggacatgtgtagctccgtgttctgataatattataaatccatgtgttctgtctttgcattctgttggggccattatattattagatttatttatcattattatttatgttattttattattagtttattagttttaataatataaatctgtggatatgagatcaatatatatttttgcctttggattgtctatcttggggaatgtttgtcaatttcttgcttcagttacttttctatttttaatgtattattattattattattattattattattattttacttattcattttatattctgctcaactgttcccctcctggtcaccccctcccacattttttcatcccataccacttccccttctctgagctggtagggcgtcccctgggtacctcctcacccccatcctggtatttccagtctccgcaagtgttggtgcttcctctccactgagggcagaagaggcagcccagctacaagagcatatcccatgtacaggcacagcttttgggatagcccctgttccagtagttcaggacccgcatgaagaccaagttgcacatctgctacatatgagtggggaggcatgggtccagtccacttatgatcttttgttgttggttcagtctctgagaccccccaaaggtccaggttagttgactctcttggtcttcctgtggagttcctatcccctctgggaccacaatacttcctcctattcttccatagtagtccctaagctccgtccactgtttggctgtgggtgtctgcatctgtctgagtcagctgctgggtagagcctctcagaggatagccacactagactcttgtctgcaagcaaagcagaatatcattaatagcatcaggggttggtgctttcccatggaatgggtctcaggttgggctggttattcgttgaccatttcctccatctctgttacataccccatccctgtgtttcttgtggacaggataagttttgggttgaaagttttgtgggtgggtttgtatccctattgctccattggagttcctgcctggctattggaggtggcctcttcaggttccataaccccagtgctgtgagccacagctaaggtcacacctgttgattcttgggtgcctttctcatcccaagtctctgtccttttcctagcaatatctcctacctccccacccctgtcagctgcagatttccattcattcacatgaccatctggccatccctcctgcccctccccacatctgatcccaattcaccccctattccccatctcctcagttacttttctattactgtcataaaatatcatgaccaaaagcaacttagtaatgaagaaagaatttcagagtattaatatcactcattcacaaatgatgtggcacagtggcaataacaagaagctagttggtcacatttcatcagcacaaaggacacagatagaaaagacaaaacctgcaaaatgcacccccaatgaggacctttcttcagctaggttccttctcctagagttcgataatctcccaatgcagtgccactgttgaataatctctgaatgcagtgccaccatctggtcccacatatttcaaacacatgaacctataaagagtatttcttatgccaacccctgtatcctctcaacttaggaaatgctatattagccagcgatcatgttccattctcacgatgctggaagatggtgacattgtgatcctttctgcttgctctattgctggactgatgaactagtatttgaggtcacctgtgtaacgctgaagacaaaagagtcacttggtaatcccctggggccctattttcacatagcacttaggtttgaaagttgcaagaggatttagtgaaataatgatggaacaatttggagatttgtgttctttcaggaaatacaggtgttcttagtaaccacagagctggcagtctactgtgcatttctgctttgcatgtccaaatataaactagatgcttaatgtctaacaatagcagttatcgcctattaagctgcttatggtataaaataatgtattctatatcactcaaagttctttctatagcattgtactggttatatatgtcgaatgcctctttcacgaggtctttatgatcatgaagtatattgcctggaatatgttatcatagatggagaacgtagtcacagccagtagccataaagcctgcactgctttctagcaaagcaaccttcacatgctgtctgatttgaagtcttgcatctttaagataggatcctagtgttacacacagctatctgtgtagatgtatagctcacacatttacaagaaaaggaaccagggtgactttagtatagttctctgccattcatttatttcaggaatgtttctttgggtgtgttccaaagtatatttgtatagtaaaagtcttatcaggcaagctggcaaactagtggcttggggccccagtagaagagacacaccggttctcgctgatcagttcttcgagattacttcaaatccctgttcacttttacagtctggcaacacttctcacagaaactcattacacagatcaatgtctgacaagattattttactttgattttatgcaatgtgttttgcttgtggtttggatcttgtgccatacaaacaccttctcctgcgcacaattccagtgctggaaagctgatagaatctttttaactttaatgttcttttcccccttagtcttcattgattcccttttaatttctctgttccttatcataggcataagcatattattgattgtattgattatgtcttttaaaactaatgaagtgaagagatatacctcatctctatgcagctggcttcattttgcttttgtgacatcctcacctgctcatgagtgtggctcacagtcctctggaccggattatcattcttattcagatgatttcccccaacaatgtatttattggttctgcatttgcatatgaaaagagaacctgagatgcttgtcacagttctttaaggaagctttcactcttttccaaatcagcatcattttctaatgtgtacatgcagtcaagtgtatagggcaaatatttgtctattgtttaattctcttgctcacaagctccttttaagtacttagtgcccttttatacatatgtacaatgactgtaggaattgttaagtggttaaaaatcaaagcacaataatatacttcagcatttctgttaagtttttcattcacttattttaggccccaaaaataagcatcatagaatgtcctttctgatataaagtagagttctcatgtgtgaataagtatctctgtgtgtgtgtgtgtgtgtgtgtgtgtgtgtgtgtgtgtgtgtgtgtgtgtgtgtttgagagtgtttaccacagtttccagtcattcaccaagaatgcagttgttgtatcctatgagagcatttcaggaagctggcagtcttctgaagcgggtgggccactgcatctttttttttttttccattttttattaggtatttaactcatttacatttccaatgctataccaaaagtcccccatatccacccacccccactcccctgcccacccactccccctttttggccctggtattcccctgtactggggcatataaagtttgcaagtccaatgggcctctctttccagtgatggccgactaggccatcttttgatatatatgcagctagagtcaagagctccggggtactggttagctcataatgttgttccacctatagggttgcagatccctttagctccttggctactttctctagctcctccattgggagccctatgatccatccattagctgactgtgagcatccacttctgtgtttgctgggccccggcatagtctcacaagagacagctacatctgcgtcctttcaataaaatcttgctagtgtatgcaatggtgtcagcgtttggatgctgattatggggtggatccctggctatggcagtctctacatggtccatcctttcatctcagctccaaactccgtctctgtaactccttccatgggtgttttgttcccaaatctttttttttttttttttttttttttttaaagaggaggaagctagttagctagacatagtaggaggtttatgcaggagagctatctcaggttgcagtccaggaagaagaagttgacattagcatcacctgtacgcactgcttttagctaagggtcaaccacatgtaaacattcctactctgtccaggggaaggttttgctctttccatggatctgagggatggtcctcctacagggtcacccttctcctcagcttcttccagcttttccctaattcaaccacaggtctcagcagcttctgcccattggttggatgcaaatatctgcattgattttcacaaaaagaggaacatttttggtaaattttttttttccattttttattaggtatttagctcatttacatttccaatgctataccagaaagtcccccttacccacnnnnnnnnnnnnnnnnnnnnnnnnnnnnnnnnnnnnnnnnnnnnnnnnnnnnnnnnnnnnnnnnnnnnnnnnnnnnnnnnnnnnnnnnnnnnnnnnnnnnnnnnnnnnnnnnnnnnnnnnnnnnnnnnnnnnnnnnnnnnnnnnnnnnnnnnnnnnnnnnnnnnnnnnnnnnnnnnnnnnnnnnnnnnnnnnnnnnnnnnnnnnnnnnnnnnnnnnnnnnnnnnnnnnnnnnnnnnnnnnnnnnnnnnnnnnnnnnnnnnnnnnnnnnnnnnnnnnnnnnnnnnnnnnnnnnnnnnnnnnnnnnnnnnnnnnnnnnnnnnnnnnnnnnnnnnnnnnnnnnnnnnnnnnnnnnnnnnnnnnnnnnnnnnnnnnnnnnnnnnnnnnnnnnnnnnnnnnnnnnnnnnnnnnnnnnnnnnnnnnnnnnnnnnnnnnnnnnnnnnnnnnnnnnnnnnnnnnnnnnnnnnnnnnnnnnnnnnnnnnnnnnnnnnnnnnnnnnnnnnnnnnnnnnnnnnnnnnnnnnnnnnnnnnnnnnnnnnnnnnnnnnnnnnnnnnnnnnnnnnnnnnnnnnnnnnnnnnnnnnnnnnnnnnnnnnnnnnnnnnnnnnnnnnnnnnnnnnnnnnnnnnnnnnnnnnnnnnnnnaatgtgttacctcactcaggatgatgccctccaggtccatccatttggctaggaatttcataaattcattctttttaatagctgagtagtactccattgtgtagatgtaccacattttctgtatccattcctctgttgaggagcatctaggttctttccagcttctggctattataaataaggctgctatgaacatagtggagcatgtgtccttcttacctgttggggcatcttctggatatatgcccaggagaggtattgctggatcctccggtagtactatgtccagttttctgaggaaccgccagactgatttccagagtggtcgtacaagcctgcactcccaccaacaatggaggagtgttcctctttctccacatcctcgctagcatctgctgtcacctgaatttttgatcttagccattctgactggtgtgaggtggaatctcagggttgttttgatttgcatttccctgatgattaaggatgttgaacattttttcaagtgcttctctgccattcggtattcctcaggtgagaattctttgttcagttctgagccccattttttaatggggttatttgattttctgaagtccaccttcttgagttctttatatatgttggatattagtcccctatctgatttaggataggtaaagatcctttcccaatctgttggtggtctttttgtcttattgacggtgtcttttgccttgcagaaactttggagtttcattaggtcccatttgtcgattctcgatccataactctagtttcagtggaatgcagccccctcttctgaccgctggagacagtgggttctcaagcagtgtgcttccatgcattcaaccaaaacacttgctcatacacataagtagaaaatgaataaatctttctaaaatagtaaaagaatagtgttatggtcattcctaaatagtaaaatatacgttttcaagacttaactacaatttttgacatgtagatgtatacactaacatgtgagaatttgtggtcgagccagagaaaacagagatgcaaaagcaaaagagaaggccattggctcagtcctctgtctgcaagaatggaaacattgaataagtttcttccttcacacagacatttgccgattatctgagaagcccctaaaatcgatgtgtgtcttggatctaagagtattgagcaggtgataggctcttaaccagtgccccctgaatgacactcactagtcttagtcatcctgccctgactggacaccaggaggcttcttgtctttactttaatgggccagacatacttctgaacttccagcgcttttttttttatgtcaggcacttggagccttgccctgctagggagaccagatgaacgacggaggtctgattaattagtatttgcttcatatgtgtttgtttttattcctctctaaagttgtactggaaaaagaaaatcctgcctaatgcaataacaaatagtggaaaatacttgaaaattgtacttactatttaaatgtaaaggtcaatattattgtagctgttagtaacgacaaccatcatattaaaaccctaagcgtaattccataaagagcttgttgattccctcctgcccttttttgtccatcctcttagcccaccccataatccggtcacaaaaattaaagctatttaggggtgtttgagtcagcatattgcctatacacgatttatcttcctgcaatacacactttcctgaatttctcaaaggcatgtgacttcaagaaatctttaaatatgtaaataatattataagcttctgatgaattgcagatgaactgtattattttgatgtctgagtgatgcaacaaaaagctcaaactccctgctggattattcctgtcacattttacattaataaacatcagtcagcctgcaagaatggtgtgttatctgaatttaatgaacttctgtactgaatggaatgcatctagttgacaaagtgtcatcaaacagaacagaagagagtacagatctcctgaaaacaggaaggaaagaacaaacaagagagcagaagagaagagaaaaaaatcccatggaacactgtccagggggttcggggtgggggtggggctggagtgtgcaagaaagtcccagaaagcaagtctctgtgggtggacagcagtggtagtctcctgccaggagtcttagatctgtgacattaatgttgcctttccttcttattgtagataggaactcaagactaaatagaggaaagtgtctgttaaaaaataatctacagtaaaccattcaagttagttaaatgcagtacttcataggtggctctacttttggccttataatcttgtacccaagattatgagattaaagataaaacttctttaaatgaatttcactgccagtctccccatcttctttttagtacattggcacagcagcacgactgcctacagttggtatgtttacacgtataatatgtggatttttagaacacacggctatactgtcgttctctaacacagtacgaaaaacaaaatggaagcttgcaaagtactgccctttatgttgttctcgggatattttcaggaccacagttgggggaattgatcatacaaagaaactgatatgtagcatttgtataattagatagaccctggagtacacactaaattgttaccaactgtgtatgctgggatagttgaacatagccacggtggtcatgggctccttttaattttaggggggttctcatctctgagtcttttcagatcgtggggcaagatggtaacttccttgttgaattccttatgtcttttatcctaactttaaatggaaattttactctcctccctcatgttagtttgggttgctagtctcagcaccagtcttcactatgggggtctgtgagaagggtttattacagccttgctttgatgtgctgctaaatgcataaaacctagaaagttaccctggaccttttcagggcgaaagagcaaacacggtgattcatggcatttcagtttttcctatttttgttttgttttgtagttgtttgggttttggttttagcaagggtactcttagaacgcatctacatttattgaaacaactgtgaacttaaaactcttaattttttaaatcaactcagcattttacaaatgttgtcattagtccttagacagggaagaggcagagaaagaaaagagtggggaagaagagatgagggaaagaaaggagaaatcgatgagtcattggttcaagctctagctgtgtgaagcagttaacatgttgcaatatttctgaggctgtcagtatcttctgttttggattctgtgcaagtgatctttgtgtcaaaagattgattttcttgtcattaggtatagaaacgttagcagagctcacataaaggaaactgatgaataagtctagtctgttgttttccagcaaatagttttggtatctaaggctacagagcttctcactgagaggggatgccctgtggaggtaagatgcacgcatgcctggtttccacctcatggctccagtgtcccacagccttctgagatttgtagtaagctgggatgatctgtagctgatgcttcgtgtatattctttgaccttcatgactttgattgatgctggagtagagcatcagtgatggttgtcatttgcacaagcccctttctatgccagggtggccacaaacgtttagtatttcttagcactcaaaacagtgtgactttctaaaaatgtaagatttccagacaatctaaagcatggagttttaacatgaaaaatcagaggggttcggataattcacttaagtttattgttttccaattactcttaactgaaaaaaaaatttttagtaaaagttgtgatttccttgctaaacattcttaacatcattttgctaataaatatacttaggaaaaagtcttgaagtacagtttaacttgataacacgagctattttttaagaagcgagcaattataaattttgtattttagggaaattttgaatttatagaataattacataatttgtgtaactattttagcacgacctgacccatcctaaccgaaattaatgttttagcagaaatgtagtcatttgcatttatgttcttcaagagttcatcatttcattcattcatccagacattccatcccagaacaaactcttatcacctctaccaagaagtagcaaatttattcataagtatataataagctaagtgtgctagctcaagaagcttagaaactaatgttagtaatcgttaacatttctataatgttttataatttattaaacaaatactatgtctatctcctactcaaattcttacttctctatgctcactccatctcattcagtctagtcactggttgagtattttattatccacaccccgtttccttacaggagagaatcttgaagaacaagaaagtcttatacaacattgttcatgatcatgttcagggacttagaaggtgccttacagaagtacagattagtggagaaagcacaggccgttaagtgtttcctggctatgcaagcctagctaagacacaaaacacagtatttcctttcttgggcaatagatcatgttgtatagggctctttaggatgacgatttctgaacaaggaaggtagaaagggtgtgctcaaatggacctgccatttgacacccatatatttttgggaggccactatgaaccagtcactcgtctagaacctgagaccaagattgattaatacatagtctgaatgcttacatgctaattgtccgacattgggaggtgacaaggaaatagtgcctgatactttgacaatgttttcaaacatctctccagtcctcatcctgcccatccctccatattagagaaaccttacctaagaattagccataagagctatgttatatcccttctgtggctgtgtgcacacagagaaggcatccatgtaagttgtcatccctagagcttcctttacattctttgaaattagggcacatgccctcgtttgtgaatgaacacaaaggcagttttgtactggttatataaggtttgtttaaaatctatgagttagtagttagagtcagaggctaccaagccctctccattcacataagcaagtgaatattccctgagattagaaggggagaatgcaaaccctgaactctttaagaggtgtgtacatgtgcggttttctacacctgccctgacaacaattctaatatttattaggaggcatgtattccagaagtggaatcagtgcctcgagaatttaatggagccaatcagtagaactttatgctacagtaaatatccttgctgtcaggccgcaagtagcaggttcgattcccatcctcctcacctcacacttctgggtgttaagtgccaacacacatatcactcctggcctgtccacagagtctgactgagtccaccatgctaatgagatgtttggatggctattgtactctttctttgttaatggccatgtaaaatccatccatgaatctgaaaaaaaatatcttaaaaattggtacagttccttttccaaagaaaagatagacttgtcttgatggagtcttgacggcagcaaattgagaggaactgaaagcaaaacagcctactcaaggttagacagtgactggagtcatttcatgcacttaaacaatatttaggatgaccctatgtaaactcgtattatcacttaaagccggtgtaaaaatataccccatctgttgtgctaggcctgctgttgcttgccacatttctctgacaagctgttacctcagtatagagcgagagtatacattttggaatccggaattcgagtttgaaaaaaaaaaatggtatctggtacatatggactagattctgttcttccaaatgtggatttgtaacctcatttattcttaaagatgatgtgttaaattggggctttttttctttttctttttcttttctttgttttttttttctttcccccccaatatcctgggttgttggtatttgagggatttttaacttttttttttcattacctggagcctggagttctcataattttatgcctttcacatggacaatgtgcaataagagattgtttagtttacatctgtcacatgacacacagagttggtgcgaggagttgtgaatagcatagctgagttccaagccactccatgtagtctgttgtctgtagatttgcaggtattaaagacagacttaggaaagatagtttgtataattgcttctaaacaagtgaatttgaagcttaaggactctaattccaggctttctagtggcatggaagcagccaagagataatctgctttcttagagcataagaggcaagactaggggttatatcctcaggtgtcctgttttcctctctgctgcatggatctgggaatagcacgtttacctcggaattgcaggctagcacagcagtgctggatcactgagcaatttgctcttgtttccaagggccagtcaccttgctttcctgctgaaatactacaaaataaccaaaaggttttttaaagaaaagaaaagaaaagaaaagaagagaagagaagagaagagaagagaagagaagagaagaaaagaagaaaagaagaaaagaagaaaagaagaaaagaactgtgcaggatccttcttaaaatgtagtgttataatttctcaaaatttttctaaacttaggtttttttgtttccttatagtttggcttttttgtccattttgtcatttgttgttttgtttttgttaaatataacctaatagcttgctcaaacgatggcattttatttattattgtattccactattattcattacgtgactactgttttctaaaatttgggctacaaggtctgcagaaatgcaaacaggagtccagcagaacattcaaataatgtctatacagtcagttgtgtggagactttaagcattaagaaaatactcaaattaaaacccatgttgtttatttctccagtcaagagacttttgtactctactttgacgtctgtggtcactgttatccaaggctacttcagactggtatttagggcctaaacaaatcccacacaagcatttttgacaccagcatctcatgttgaaccagcctcgcctctgcattggcacgcatgctgcttcctcctacccattatacatttgctattgaattgaacacatatggtcagtgctaaagctttgaccacaatcacatttgaaggttccactaatttttgaatgtagtttccttatcaccaatttagataactagaaatctggggtaagaaaatgtagttgaagctgtaaactcccccatctcctgccagcagctttttgtcctggtcagtgctgtgattaacactgtccctttgtgagcctcactccctggtgttttcttccatcctctttttggccttgctctcattgatgcttcttggcagttgtgggtttctaatctaatgggccaattgcaattccttccacagccttcacataaattgtctttttcccacatacttatttatgcagtttagctcctcctactttgtctcatccaccccttaagtcattccagttttcctctgttgggtcaagtaccactgtagcccttgtttgctactttgtgagttcttctttattccacctttctctgttcttttccttctaccctttaaccctctaacactagataatcgaggaaaaaggaaagagatccctgaataaagacagcagtcagaaaaggggtgacgttatcattagattttgcgggttggggcatcaagttccttggggcaagtttgatctttgccttcaagatgttacttcttcttcttcttcttcttcttcttcttcttcttcttcttcttcttcttctttttcttcttcttcttcttcttcctacttctcctcctccacttcctcttcatcctcctaattattcttatccttatccttctcctccttccccctcctcttccttcccccttccccttccccttcctccttccttccttactcctcttctgcctctctccctcctcctcctttcttcttttcatacaactacttaactaccaccaacaatcaaccaaccacctctcccagtccttgcatttatctaccctcagaaaagttcccagaattccaatcatcacataatcacagaaactatctgcaggtagcaaaattacaccccagctagtgcatgagacaaattatagtcatctgctgtgggcaatctgacacagtgccatatcctcacctctgtgagcaaaaatgaaactcattcttataatatttctgtgatgatgtgaaatctcagctttctgctccagtcaccatgcctgatgtttgtggtcatcgctccttgccatgagggacttcagtccctctggattcataagtcaaaataaatgccttttcatatgtgtgaaagaaagagagaaagaaagaaagagagaaagaaagaaaagaaagaaaccaaaattccaaaatttcactacagtactacagaactgaaacaaggcttctgcctcctttatgggacttactaagttttgctctgacctatgatcatatctcagcacattataattgactgtgtagtaaaggtaatgttcatatttacctacaacttatctctctttcctaatagatgtataaggaacaagttacttttgtttaatgtttcttatcccttcacaagttccatgagtaccttgacaatcacattgaaatttgtaagaattgacagtaaatgaggaataattatcagtgttgccttcagttagtagggtttcaatatttattgacatttttcttttgtttttgagattagaattttatcatttctccctgtccatttctccttccaaagacaacaatactgtctatgaaaaacataaattcagttctgatcctacaatagaaaatttatacattgaagtgataaaggagaaagattgttagtttcagaattatcccattgccctctttgcttatgaagtagattctgagacttattctacccatttctcttattgtattttgaagtgtgactgttaaatagccattgattcatgttgcattgatacccacaggtgtatttttaatattttgctgatatagggcccagtcttcatagaggtatagaaagctgcacgcctgaattcgctgtagtccttgcagtcgcatttggatatcacacagactgatcatttactagcaaatcccagctctggaaattacagaatttgcattatttgcttcatttgggggacatataattgaggtataaattttcttcagtggtcttagttaacactgccatacgggagatgagaagatattctttacaattgtttatatacatgtacctgcgaagcctcaattcatcttcatcttcgcattttaaatgtttttctgctcatagtttaggattcaagggatgtaacaagtctgaagtgtctgtacacaaatttcactagggactcagaggagtggaaacaaggaagctattccagaaggcagactatgggtttataatcttccatgatgctaatagacagtttccccagtattccttgtcgtagcatttgtctttcgtttatggattgttatagccattattattattttaaatcaccagatagagcatatatagagcaagggtggccatatctacatttaccccctcatgactcagccccctgggcttagtatattgtctcctaggctctagattggcaacgattttattagtttttagaactgtgtctattatcatttggacagatgtggagtttaagaaccccagtaaacgttctttttatcttccccttgctatcctgtggagggagcaggggatttttatctgtaccaattgctcctcctggcaactggttcctataccctgtcccaggcagagatgcccctgtagtcatcagtgggttatctgtgcctctcctcctcaatgggctcttgaattgcttgttttcactggtttgttctctgttcaactgcttagacagcacagcttagcattacttctggatctgctgtaaaaacaacagcagttttctcttctagaactggatttcaggagaggaatcacagccactgagtcaccacacaaggactatctatctatctaagaaggagtcacttcttgcttcatacaaatctacattctagcttctacacctatagcttaaactaagttcatttatttaattaattgatatttttacttcccctccatctcattttaccttatttgctgagaacccataatatgtgatatcatataggtagagtgggacctctcctttctaggaaaggaagtaacttgtaaataacttccctataaatgacaaacatattttaaactatcatggtgttttgggttgttttgggtttgtttgtttgtttgttttttccaagtggaaggatatgtatttctaaccaggagaaatgcgatgtgaagtggacaaattctgaagaattgtattttcttttatagctccagggtcccctgtgccttcaggggattgcacagtcccataaatgactggggatttgtataacaatgtgagagaatggtgaagacaccatccacccacatcagtattagataagttactaaatagttatgaacagctcaatactctgcaatctcagtacttgtccaagaacgttatattccctcacataaacttatattgaaaataaggagacttatattttaggtctttgtgtgatttttaaactctggtgtttgggccattaggcagggtttccatgccagctgctatttgaaagcatagatagtgccggttctttccctcatagagtctgcattctgtggcccttcctgtccttttggcagaatggaggaaatgtccctgtagcatgttgctcttctgcctgttgaggatgggaaatggcagggagctgtgccttttctgaagcgaagcagactggaacacaacccagtctcagtgcagagactcttgctcactgttcatttattgtaatttccttatcttgtatgcatggacgctcgagtgacattccctcaccagaagacgagtaacagaatgtccacccttgcatgttgtctctatgttgtagagagcaccatccacaagttagtatagacaggaactatattcactagacatgtcataacaaacactgtagcttccagaaatatagttaggtacccttgctcttctggaattacctgcaaggtttcataccaactgtaccatcccattcatgagcagtgatccttggttagtgtccctacaataagtaccctctaggacatcagaggtacaatgattttataaagttccctggacatgttgtaccccttgcccaggaggctcctaataatcgttcctcccatcctcaaacacacttccccacttcatggctgtgaacactctaggtaaatgttcactaatttttgataattactgtttctatttgatctttgaagtgttggggatttatctagttcagggctatttactcattagtccaaccactctccctctgagctacatctccagccccacacttcagcatttcatgaatagtcctagtcctttttattctcgccctttatatacatagaaaaatgccctatctctccacccttgcagcctgcattgggtatagagtcatgcattaacataccacagtctgcagtataatttacatcgggaagcttttcatttcgaaacctcagttggttttggtaatgctgaggtacccaaactccagcggaattaactaactattgagctattagtaaaaataagaaggaaaggtaacagaatgagcagctgttttgcatcaaatgctgggtaagcactcctcatgtataaattccgatttccttgctaagtggaatgccatctcatctgataaagtcaaatctggaaccagaaatactcaatacattgtgccattgtggttagcaaaactaagctttgaactctgaagatcatttattgcaaggtctctattctttctcttcatgaaatggcaaaatggctcttctgatactaatggctcaaatcattatgcttatcgacttgcagatgtaatctagaagtagtttaaagcaacatctacataccgacatgctaaacatatgttctcctttgattcctcttgctgtgatgaacacagcgaccaaaagcaacatggagaggaaaggtttatttcatcttggtcctccatcaagggaagaaaagacaggagcttaaaacagaaactttggaggtctactgctcttggcttgccccgggattgctttcagcaacctttcttatatagcctgagcccactgacccaggaatggtactgcatgtagtggtctgggtcctcctacaccaattaacaatcaagaacactcccccccccccagacataccaacagatcagagtgatggaggcgtgtcttcagtgcaggttccctcttccagttatgtcagagtttagccatcacaaatgagtaacttgttcagcatgaaaggataggactcaccctgctctgctctgccttagttaaagagatagaaggattgaaaatagcacttccgactctggtactgttggctgcagcacactgggcatgccttgctgccagagcagcattagtggccactcatcagtctcatcagtcagctttattttctgttcaaaaactaagcatcaaaaacgaacctggatggggcacagaaggagttggtaggaggatagagtaatagagatatagtgcttaactatgacattctcaacaaaattcctttttataaaaactgaaggaaagtggacccaggaggggaaaagagtaagaaagaaagaccctgaatggccccaaccaattagacatgcttcaggcctgtgtcgtatatgctctgttcagagtgctgtgggaaaatgtgtcaaatttagaagccaatatgccaaaactgtagccttgcctccaccactgagtctcgacagcagcatgcccgtgtaggcattagagtgcacactcaagctgcactctatggtacagacagagtccaaagctcttagtaggctgtccttttccattacatgagaatgtgttggccagtaggcattggaagaggtgtggaatcctcaccttgtaacttaagctccctagaaccatacatttcagttctttgcattgagttttcctcctttgtgtcttgtgcatcggggttctctccatcctccaagccagtttcaggtttaatcattgccatgggtgtgatcgtaggagaagagtagaaacagcaaaggttcactggcttctgggttgggctctgtgtggattacatgggtgactaggatataatttttagggaaaagcaggagaaaaggcagagtagccaagtatggtggcgcatgtctttaatcccagaacttggaaggcagaggcaagtggatctctgtgagtcagaggccagcatggtctatagagagaattccaggacaaccagggctacagagagaggccctgtctcaaaacaacaaccacaaacatttgtgagaaaatatggccttgattaccatattctgatggtatatctcttgaagataactactcaaaaacaatatcttacaattactcagagggaactgtaaattattggaacaactacagattatttaggtaattcaggatacccaaacaagaggcaggttctagcaaacctcaaaaatatttaatctcccactgtttgctcccacttctgttttgtttgtttttttgagacagggtttctctgtagagctctggctgtcctggaactcactttgtagaccaggctggcctcgaactcagaaatctgcctgtctctgcttcccgagtgctgggatcaaaggcgtgtaccaccacgcccggctttgctctcatttcttaggtagtttagcaagtagagaacacacaacagttactactcagtttgatcagggttgagctcgaagtgtgcttgggtcagacaggtgtcttccacttctcagagtctaggtaagattctgggatagtttactaagagaccagggcttgtttggggaatggcagactctcctgtgcctaactctgaactgttaccattcaaccaactgaaacatgaaaagctatttgaaaaattcccagaaataattattttactttttattgtttctagtatacagtactatagttcagttccaggatctgcagaggtcctctctaccaagcccttttaccacattgctggcttgaaacaacaggtcttttccactctgaataaggggctgaatgaatgggtggctgagacactttatacactactgtagcaaatgaagctctttgtctttccattgtacattacacatttacttttgtatgacttattttatgtatatgatacactgtagctgtcttaagacacaccagaagagggcatagaatcccatttacagatgcttgtgagcaaccatgtggctgctgggacttgaactcaggacctctggaagagcaatgggtgctcttaaccacaaaggcatctctccagccccacattatacatttctgtagctgtagacatgtcaagagtaagttaatcctgaatcttaaggagagaaaaagatgcaggaaaggcaactagaaccaaactagagacattaatttgtgagtcatctgatggagggaggaagtttaacttttccccacagtaaacatgggggctggtcatttcttggcttgggagaaataagtagaaaacccaatacagttgtgacttctaacttgaatactgaggagcaggtgaatttgcatatgaccataaatgtgtcacattctattccgtatggtcactttgtacatgatgttcaagctgtctcctctatgggacacaaagttaataacagtcatggctgttggatgggctccttgttaaacacactgcactctgctctctctccagcagaggcgttctgagcatctgcagcccttgctctctcaaggtcaccaccatgaccatctgttaatatgctctgctgagattcagtcattcttctctcatctcccctcaggctgtcagctgtcctctctgctgggactaagcggcctctcacagtcttccccaccaccttcaattgcttattggttccaatatcctctggtgtgaggaagaaataacaacaaaatgggcacttgactcattggtgaataggagctgtaagcgtaagagacaagcctgcccgagcatcagtcacagaggaaggcttttgctttcaccattttacaaagagagctgtagagactgtgtttcctgctgcttcaatttctccgcctccttccatatctccaccatcattttcctcctctttctagttctctagaatgtcttgaaatgtgacagctacatactgtcaccctcgctccgtgcagattttgtttttctatcacaacaattggaaggccatccctaaatcagatcgttttagattgtctctgttctcggtggctttaacaacacagtgactcaaagctgcatacagttggcagctttcagccatttatttggactaccaagcaagaatgctcacagcctttctgatgaacgaagacatctttatttccagttcacacccttcatcataagaagggtatttgaagggaagccaaaaagcatacttctcaaacttcatgtttcacatgcttgcaggaattggggataattccttaccccagcgtcttcacaattgtgcagtagaaattgacagtaatgtactcgcggtccaccaacaaagagaaaaactatatatgcttcatttacttcataggaaaagcttcagttttccacaattgtatttttggaagtgactagtgtatatactccatggagaggaacaaacttttttatttttttcattttatttccttactgtctttgaaagggtctccattctggaggccaaaatagagcctctgtaatagttaccagaaactttttttgaaattagaaaaactatgttcaagaaacacagatcttattccatgttagtgaaggctacaacttgggggctggaacaaggagatttcctgcattggccaaaacttaaagagctaaattgagaaccctatgccatcgctgctgtctgcatttccctctgtgcactgggaaccacctagggtctccaggccttgtttcgtggccaggacaagctttgctgctcctgaaactgcactttctttccagaagtctcctctccacatccaagaatggccatgtatttgcacactctttgagatggctttccttgtattgacttatatcactgacagtatgaatttattttgcaccttgtctttatgatctataaaccttctgaaggccagatctacttctaacttacctgattcatttatgggtctgccccctaatgtacttttcaaaaaagtacacatttatgggaagacacaaggatggattacttctagaaaagtttatattgcaatccctactataacaatattaatagatattgtcacaggatgtcatgtagcccaggctggacttgaattaataatatttaaaactcaaactcccaaatccttgcatgcaggcctgtcctactatgtggagctgaataggcactttggacttgaatgccttttgttgtttacaaagttcttttacgtgcatttctgtgtagttcagcacttatcctatgctatgcacataagtgtgtagtataaatgtgtatgtgtatccattttgtgtctgtgtgttgcttatattgaacaaactcacacattcatatacaagctgagttctgtaagggagaagctgctatgttggctgctggagcctcacttcagcacttggcaagaaggaaaagctcagggaggatttgttagctgaaggaatcaagttattacctcgttcaggcttcaccataatcatccaaagtgcataaagtccatattgtatcttgtgtcttttcaagttaaaaaactgagtcccaaggacctgctcagggtttcaaaggtacacagtggccaaacaaaaacttgaaccctagctttctagatccataacctttcttcactgacttctgggaattttctatattaatagcaatgcatgaactatctcacgaggaaaaattgcttccaaatttaaatgcgtgatgcatatgcaggaaatcactgacttttcaatccaagggtaatgcggttggtgtgactttcagggaatagggctttcttttacccactcttcctgatgggcatgtgtcagtgcacacaaatgcataccatacatccctcacttcacactttccgaggcttcttaattcctcctcaggttctccatgctctggtgtcttttatagcttctgctggaccaggcacccacatgacatttgttattgggatgtcagcaagtgtaaagactgtgggaagagagaaagctgacccatctaatgtagacgagagcctggtactagtagaagtttgcttccgtcctgattgtagctcatggcaggaagcagagtaaagcctttattgatgactaagttgtattgaatattacagcatgtcactaatcgccacgagaccctaatggaataccattcttactgagatgggagccaaggttcagcactggagagaggtgacacaaacaccacagccagggaagggcggccttaagccctgtgcctagaacacacgaacccttacactgaaattggccgcatagtgtaggtgtttgcacagtcactttctcttcttgggaaactatctcttgtgttctttaacacatctttgtaaatgagaaaaaggcacacagtgccctgagatcacagtaaaatacaagggaactatattcatttcccatattcccatattcagacagacagacagacacacacacacaattgaaaaatctttaaaaggattgctgtggggaacaaatgatgtcctacgtggctcagcagttgagatctcactgctcttgaaggagatgtgagttggttcctagcacccagggttgatagctcataactgccagaactgcattcccaaggagatctgacgccctctactggattttatgagcacctgcactcatagatccctcctgaccagagtctgtctccttgcccatctccctgtctctgtctttcatagggaatgttaaaataatctgataaaatacaagagaaaagtaacattagcttttaatctaaagtgcatgtgggtagggtgagtcactgaaaattgtacaaaagagatcttaagttctgtaggatgtttcaaagtctgtggaaatgcagtgagtagcccaggaactctgtaaaagcctattttggtgctcggggtagacagatggtaataaggtaatgggatgtctagtctatgcagattcacaagtctggttctgcatttgaccatgagtcaggccttggacatggtttctccatgtagacttatttctttctcttttcgtttctcataaatggctacgaagacttgctggaagctgtgtgtggttctttttactgaaattatcatttggggaaacacttgttctctaagacttactgaactccaccccacaaagcatgccccctactcagatgtcatctcctgtacatcatttggaagatggattattggggtttcccaccagtccccagctcagtttctatttccaaattccggctgccagttccatacttggttaagatcctgcttctgcctggtatcctagggaaacagtttgtaagggctgctgtgtccatctgccttcctgcctgagtttttgactatacaccctgattatttcctaatctagaagtgaatcacaagactgcaaatgcagggaacagccttgaaatatgttcagagtgtgaatacttacagagttaggcctgagagtgtagagcaagacacttgcatttgtgactctacttatgtatatatttataggcactttgataaagccaatgtaagtgcatacatagttgggctgtgtatcaagaaatcttaatttttaaatgcagagacattacaattacagtgtgaacatggacctggaaacctccctgcacaccattcccagtcagctgtgacattgttcaagggacccttggcttgaagttgtcaagataagataagttggttagcttcaggctgtatctcttcatctacaagaagcccatcctccacttgtcatgggaattttgagcctttgtcctagaattttttttttgaccaaactaacttgttaaataatatattctacagtcttggttttatactcctagatacataggtattataccatcagaatcataatttggggtgtagtggtgaatgtctgaaatcccacacagcaggatccagaggtcaggaacattatgagttacaaaacaggactatatcacaaaagcaaacaatgtagagtaatataagcagtatcctagacagatttgatttttatatcaataaacagtcttctaccagataaatctgtatacttttcaagctttgaaaagtttgaaccttactcctaaatttccatccagcacacttaatatgaacagcaggttattaaaaatttacctatttggcttgtaaaactttggagcctagttgctaaattcaccattggacattgttggaagtcaaagatgagcagaaaagaagaaagcataggttttgacatttttgagcacactaaccttgtccttgtagttattctagccagtacaatgctaagtaagatccagaagatgtagtgagtaggtgagctgggcctctcactggaagcttgtgaataaaaatgtttggaagggtagacagcctaggtcttatcatatccctagcattagagatggagcccttagcagctagaatctggtgtttcatttaattacttttcaaaatgccgttaccagaatttttatgtaaatacatattttattccctgaggcatgttaatatgaaatcaaaattatacaacactgaaaggaaaacacaatttcctttcttttcaccaggtctctctaatgtgttgttgaaaacatgctataggatggtgaagatgctcagactgtgcctgtgattcctgaagtatttatactacagagccatagcaccatgtcatcatgatgatcgtcaggcagctcacagaatgcagttcagtagactatgggcttagcagtgatcctgagctcccactgtaggaagtgccgctatccttagggaaacaggccctaaattgacaggcacagagctacactatgtggtattcagtggttgatgactcaaagagacatggctatttcttattatatgtttatatgtcaaacattgttcgtctgtcttgttacccacatcattcctagaacagaccttgcatgtgtggctgctacagttatcttcatttttagagggcactgaaccgtagagaaggtgagttatttgcccaaggctatacagttaacaataattgagttttgtgatgtattctcttgttctattctctaaaaacaagctgaaaaataagttatattggatttgacaggttaaaggacaagaacctgaagactagtggagcaaccctgcagtgtgcaaaggtgggggcgggatgtgcagtgcctggctcctggtgttcatagtaatagacattacatgagcagtggatggcctgggagtcaaaaatgttctcacagctggtgttgagagcatggagtgagctgatctggaacagagagagtaggtgataaatacaatgtaaacacccttagggatggcaatccataatgaagaaaccaaaggtgacatagttcattccttctattggttaagtagcagctgttcttgtccctggtcatccttcagaacttgctgggaagctatctaatactgttaacgcctggtcctcccctagtcacggagataatggtctttggggtagaattgctgtgaattcagtctctagtgattctggtgagcaggcctggctacatgaccagcttagcagagagattgtatcctgtgtttgacatcagaaagcaactgcttaaaaatggcatcccaagagttcccatgtacaaacccaaggaagcctaagcatttccccgctggtcatcccttgctccagcctgtgagcctcaacaggcaggggattcaggttgcatacttcttccatcccctcttgggatacttattcagtttttctttaaataatttctggtttgtcactttctagaaccttttatccatgcctgattctctatgtaattatgattttgatatagtcagggtaatatccccttggccttatagtctagggcttggggtcagagccaaaatgttatcattcatgacctatgtaatgcttaatttcctcatccatatcatgggggacattaactgcatttgcttcacaggaagttctgattattaaataaaatatttggtccagtgctctccacagagttgccagtaaatgtaatctttatgattgtggataataacatgaaacactgataatgaatctcggcaagaaagcacttcctatggctgactttctgtagattccagcctctaccaacgagaatagaagatagaaaattctaggttcctttaaggtaagactctgaattgtcaccatgccttattttgcagactgacctgtgatagatgtttctgtagagaaaccataaaatattttgatatagtcactcagcctaggacgtctagccctaggatcagataaccttggaccaaagtgttgcctttcatgacctatgtcatgctaactttcttcatctatattatgggatgatacccttagggatggcaatccataatgaagaaaccaaaggtgacatagctcattccttctgttggttaagtagcagctgttcttgtccctggtcatccttcagaacttgctgggaagccatctaatactgttaacgtcctggtcctcccctagtcatggagataatggtctttggggaagaattgctgtgaattccttctctagtgattctggtgagcaggtagtataaagaacttgtggcgtatacagacaagattggagagcgtgggaaagtactcatggtgccacacatggtcttaatgtagcgagggctgcacaagagtgcaacaagttacatcgtggcttctgctgggtttcttatctatctggtgtttgcaggaagtttgaaacagcacaggggaaaggggaaccacaacatcaaggatgtgaaagctgcatgtattcaagcagggtttgggcatcagacttaaactaaggggaaaaccaaaggaagctggcttgtgtgtggttaagaggaacaggggtgctgattgagggcctcagagtcaagctctccaaaaggctctctcttagctttgtctttaggtgtgtgcccactcctgaactcaccaggtcacagcggataattccaaagtcatacagatagcccaggataatcccaaacaaaacaaaacaggcatccgtttagttgtgcttagtctttcttccccatgctttctgcttatttccagtttctaagagacatgttctagttcccttctgccttgttcattctgcagatgagcaaacagtgatgacaggttctcatcctcggtctcctggctgcctgtgtcctggaccatagtctgctctaactccaagtacagagatgacagaccaactttggaatgtattcaacttccttgctgagaataagtcaacatgagaactggtgttcttatcttcaagaataactgacttctcttctttttgttgaccaagttcttaccttaactgcccccacataactactttagaagaacccatgaccttgctgagaactgctgcatgccaaggaagacttaatttcctctaagtacttgagaggagaaaaacaataatctatatgatgggcttttggctgaaacccatatcctctagaaggtagaacttggcataactcatggtctagtttaaagaaaaatgttttgttctgatgtcatctgcctaattaatgtaaaagaggattgaatttttcctatgcaatgtcatttagccttaggttttagagttaagtggctcagatcaatcctggtcttttgaggctttgtagatgccctcagttggagtgacctgcgcctggtatttataaggtggtgtactcatgacatgggagcagtacaggaatgtcccttctcacatttgcttgtccatgccttcgtatgttgaacagtacctacatgccaggataattgaaggagggtattagaatatacagaaaatggaagaggagactgtgtagcaggggagtcatagacttactaagtaataatcagtgtgttgatgaagaagagagaaagcttgggaagataagctgttgatctggctggatttctattttttaagtacaaatgtttcctatggctcgtgttttcaataagattgtattaaaagcctgttttcatggtgggcattccacttaaggacaaaatgaggaagcatagaggtggtccctaccttcaaggagctcacagtctattgagttgcctttctgattctcccactagattgtgagctgctggagggcaggcacttgaattcatctgaaaaggtagatataattcagaatgaagcttgtgtggaatgctagctctgttgcttgttttatgatcgttacagctacttgattactttggggaaatgaaatgtagaaagattggatgagcaaaggaagagacaggttaacacagttttctaccttaatgtttgttgggactcagtgaatttcggctgcctggctcatcccttgatgcctcaggattgggaggagtaaaggttgagatctgacatctagtttggataagcagcagaccctgtctctgcttggtcaatacttataatctaggctgtaaggtaagagccagggaaaggcttgggctctgcccctcaatcccaggaatctactaagcacacgtcagaaccaaagtcaaaagaaaatgatgaaatttactctctggccaaaatgctattatttcactgaggagaaccaagtttcttggcaggacatgttgatttgattgtacttatgtaatcaattgtatttgcaagtggcatagtcattctcacaagtgtcttaaaggggaggtattggctatctctgctctctgcttgaaacttttcagagcatttttacaattcattactcacttgttccaaataaagtctctgaagtcccagtggtaggagttgtcacccttcacgatagtcactgtttcatgaggtatgactaagtcccagaggagttggtgactagcctgaagtcttatagcacattgtgcttctacctgtttgtggatgatatgctaatggctcagagaaacagaaagagagaagtgctaatcatttctatctggctaacacattgggaactctgagcttctgttctggcttatggtttagaaattcagaacagagtgttaaagattgcttctttggcttatgaaatactgtcttctattcctgtgactttgacaaggtaaaccttgtcagttacgagcattatctcccattcagagtattgtcaatatttatgtttaacaagcacttaagtcattacatattgttcctagcagccattcgtgtccaaacctactttatacataatagaagcagtgtactcaagaataggaaggtgacatgtgggaaggttagaatgtgatcctctgatttctgagtccaattttcttgcatgatggagcatctctgtcccaagatcttgtctccctgctgttgctgtttaggaattatagcttggaaaaaccaagtgtaagtttgctgtagtagcatgaagtatctgttgatgtaaaaagaaaaatcacacattattcaaaggctctgctcatttgtctaaagaaatttattacctcctatttctcaaaaaaaaaaaatctattcagtgtttcttcaatgcacacattgagatggagaagctggcctaattccacattcccttctctcacaagtaatgacacattctaaaggatgctaaataggttgtcagagacgtagatgggttctataaatatgtacccaaatctcagcagtcaaaatcacatacagagagaggcctgcctctgtgaccttgcttgctgcatcttccttcttccaggatcactatggttgttaaaaacacaaaggcccagagccaaacagacctgcattcctagttacacttcagctggctgcttgaaggccttggtctctgtttcttcatttcagtgactttcatttcatctttctatgtgactctttatcaccacttaagcctcttgaatttatatatttcttagaaacagtatcaacttcaccttaatgtcagtttaaactgttgaaccctggggtattctatagcatgtgtattcttacttctacattcaagtgcttaccagtgcagtatctgcccatgtctgatcagttcatgctatttggagtaacagatttcacctttagttatgcatagactataacaccatgacctggagcttggaaagagaggagggaaaatataccagcagtgacacacttttaagtttccccggttgtgcaatggcaagagactaaggataggatctttcttggctgtagtagctagcattttctgcttataccttggtgctttctgtccccattgctgaatgagggcaaaggggaaatacctaagcagggaaaacggatgcattgcaagtatttagagtagaccttgccttagcaaattttagctgttatggttttgggtagatggctcagcagttaagagcacttaactcttaagctcttccagaggatcctcgttcaatttccagcacccacgtggtggcccacacccatccataacttcagtaacaggagatctaataacttcttctgacacccacgagcatcaggcatgaacatggtacacatacatacatgcaggcaagacactcatacacataaaataagtaagtcttaaaacaattaactgccatgttgaagaatgccagggatgggtggtagtggtttgtaggtccttgttgtgcatcttatctgcttgcctgatgttgcttctgctccatagtttgttgaaaaagaaaaaaacaagtgtgtgaagcagatgaacattaaacacagggaaacaggacctcgagaagcaaaaccaccgtctaatagcatttggaaactttatggagaaaaatctagagttcttactggtcaggctgctgtgtccttaatttatatatttctataatttccttgttaagagaagaggaagagggggaaagaaatccctgactcttggtcactacatataattgtagaacaagttttagaggcagtgggtattgaattctttcagtctgtctgtataacagtgttggtattatatgaagatgcctcctaaactggaaagtaggtgcctaggcagtggatggagagtgtttcagctagcttttagataagcacttatctaaagtcaggacataaaaatactttcacgactctatgaaaactgccaaaggagaagataaaactaacccagattccgttattacactctcccccttcccccgtggaagcatgaccatctcagtgcagtcctggggcacccagatttctccaccccaaccttccccctgcatgctgagttcttggcatgctcatttttctccagcctctcattaaagtaatcactttaaaaaatcagcagcaagagcgtgcatttcggtgagtaatgtttggcctcgtctggaacagctggcctgctgtgccacggtcctgaggtgatctgcagacagctcactcagcagcctcctgtgggttgatgctatcagcagacactttccaccccttcactaaaacaccctgctggcttcctactcggagtggacagtagagcaaacaatgagcacagagacactgagggacctgaccctgcgctgacctgaagcaattaggctgccagcctgatgcacctgctttttctccttgggtcttcacctgagatgccatgtgtctacatgcccaggtgtcccacgtccacctgtctccaggacgcagttcagatgttactttctcttatgagtgtctccccatgaccccaactgcaacaccccttttgctatgaagaagtgtaacacttcagtacagtttgctttggctttgtagacttttctctcattttattttcttttcctttttttttttttttctctatgagaacagggcccatatctcattagtctcttcagtaaatcacctgctatgcatttggttaatactctcataatgattgtgttatttacaatcatcttgctgtaattataattgtgccaaatgaaagcagtgtgctctccacatttcttgtttcctgctcatctcaaaagcctctgtggatagttaagaagcctcgtcttgaagcgtgaaaatgttgaatgacctggggcggtggctgaactacttgtaactcagaaaaagaatagagcctgggggcctggtgagatggctcagtgggtaagagcacccgactgctcttccgaaggtccaaagttcaaatcccagcaaccacatggtggctcacaaccactcgtaatgagatctgatgccctcttctggtgcgtctgaagacagctacagtgtacttacatataataaataaataaataaataaatctttaaaaaaaaaaaaaagaatagagcctgggacaacatggattctaccccctactcagaatggagtgatgaggctcagaaaacctccagagctccatgttgttcatgtgatgctacatttgtagccgtaggattgttacagcgaatagatgtcattctgattacactgctgccctgggctaccttccctgtctctaggggtgaaaatttctacaaccactgcattttattatagatcctgtttcctccttatcccagttctgtgatcttgaacaccttgccttcattatttcccagttgctcatttgtgaagtatcaaaatacttctcatggaaaatggcaagcatggagtaagaaagctgaaggccaaaacagcaccagtgatattattccagggctggagacacacgtgctccatagtgagcatgcacgccactttaacagagaacctgagttcactgcctcgcacccacacacggcagcgcacagctacctgtaactcagagcagtggagccaaccttcctaatgctgtgatcctttcacatagttccatatgttgtggtgacccccaaccagaacattattttgttgctacttcataactataattttgctactgttatgaatcataatgtaaatgtgtggtattcaagttttttgttatgtgacctccaaaggggtcataaccctcaggttgaaaaatcactgcttctgagggacctgctccccctctttctctctgtctctctctctctgtctctctctgtctctctcannnnnnnnnnnnnnnnnnnncacacacgaaataaacagataattaatactgaaaaaagaagagggagaaagggaaccagctgtagggaagaaaccaataaagttaaactgtaatgatctaaatgtatgaagatgctttaatgaagtttatttgcatgctaacttaaagaatactttttgaaagccacaaaagaaatataaataaaacctcaaaaatacatactttgctgacttatttcaaaagttaaagggagaacttatccacaagatagtgatttataaatattacttttgcaactcccaggcattcacaaagtctttccataaaacagtagtgttcttagaaagtcaagtcgttggaaaatagcaatagagacagaagggagatgccttggtgctggcttattagggctttaacctcgagttaatgacactcagcctatggggtgcacagactgaggaggaacgctccttcttggtccagaaaaagaactcttcagagggctggcatcagcacagccagacttggaattcactataagaccacatctgtctggaccagctgttgccggtctgtgtacactcgccaagaataacagcaatgattttcactttatagcaacttccatcttgggaccgcagaataatgcatcagtgtagattagggctcccatgattcttgacaggaatgggcatgcttcacagagaacggggatgctctcatccacagcatgccgctcttctgggggagccttctggggtgcaaagaggcgtgggccggttctgagttagacctgcttttctgatctgagctttcctctgttgcagcctccattttcaggtaagcttgagcagcacagccccctcctcaatgctcccatcagccagcaaatgatctccagtgtgctctgcttctgtaaagactgcaaagtatggcaagcctggagatgccgcctgaattagcgagggcctggttcttacagggcgcaggggagttccctgatagtctagccatccttaggacagaacccaacaggaaatcttctcgtcctgctcattaggagatggccccgaacttgagcttttaatgtaaaaaagactttttacagtttttattttcttctcttctgagattagcattgatccttgtgtcagatattgatagaggagacagcgtttgaaaagcagtttgattgtgctgaattttgaatgaaactattcaatctggagaagtttctcagcagtgggagcttacccttcacagacgctttttcactcttggctgtcatctccatgcaaaaaaaaaaaaaaagtattttcacctaagaaaatttctattgatgttactttatactatataattttaatcccttaagactaacagccgtcctgtgggaaaagtgtaggtgggttggaatgctgggtactcttgtggtacacatcagtcttgaggacacctatcaaggtacgagtgacttagtttcaccccttggcaagacagtgtgattgcctatcaaaggtgcttggtgattaaatgagttatttaatgtgaaatatttcgaatattatctgatacctgctatatagtgccctgtagctactttcagtttcccaagttataaatcaatgaattatataaatcaaactctaatgtatgccgagctcatagaagtcatgaagacatgtctgtgggtacatcacatggctggttgatcagaagtggcagagctcctcgactttatgttcaggatcagttcctatctccccgctccctgcggtgttgatggatggcacttaagtccttcatgttctctcacccaccttctgccacttttgaaagacagccatagctcagatttgacaggttgtgtgaacatttaacacaaataatcatgaggcactgttaaatactagcacatgccatgtatcatctgcataccactcacgatggctctgaagtgcctgttcctcacgtcatttatcctcggaaatgtgatggtaagtctaaacacccccaccccaccccacccccgccgccgccaaagtaaaataaaaaagaaataaataagaacagtggagagtaagtggtgtgacgtcacactgctctgccccaaagccaacactttctccaccacaccacaatcagtgtttctgaaagcaagaagggccgcattagtctccagcctctggtataattagcatcaggctttaatcagtgaggttgactgtcttgattaacctttatgatggatcatgtaagtttcatatttctaaatgaatatataaagatagctgtaaatcagtgggaaaacactgagctaagatcagaaggctcataggtaactcatggctctgctgctccctgggtgtggttttattcaaatcactccctcccagataggccattaacaaaccactgatttgattttctgaatgaggaaaggtgagggtggggaagaggatggaatggaaaaggaaaccccagggtcatgatgtgacagtaaaactctggtgtttgtcagtgttggaccaggttgcttacagacggtgaaggagcaggaaaatccaaagaaaatttaatcttacagtgtttaatctctcctgaattcttttacaccaggtcctaatccaagcccctgatcctcttgtcttgtttaggccacaagaacattctgtcctcttgaatccacattatctaatgatggttttacaaaattgccacagcctgggcacatttaacgcagacactaagttctaatgtgccacagggtacagtggcttagatggaccatcttacttaactcataagagctagagaaagtacccaaggagctaaagggatctgcaaccctataggtggaacaacattatgaactaaccagtaccccggagctcttgactctagctgcatatgtatcaaaagatggcctagtcggccatcactggaaagagaggcccattggacacgcaaactgtatatgccccaatacaggggaacgccagggccaaaaaaaaaatgggaatgagtgggtagggaagtgtggaggagggtatggaggacttttgggatagcattggaaatgtaattgaggaaaatatgtaataaaaaaaaaagatctgttaacacacatttatatcttaagtaactaagacatatttatctcaatctctaaatatcttgctccacgtgtcaaatgttgattagtgggtatggagttaaagcagaagtaagaattgtctatctagaatgcaggcattaagcgccttagccacactgattgcttttctttgtccttttgttttttcttcacatgccttgatttcctgaccaaattctaaactgttaagctagacagatcacagccatcatgatgtttgccctgatactgcacgagtccctaatatttgcgcagccttaaatcactaatttaatgcagctttagttgagcttgcagtttgcctacggtatagatacctaagaacaaggacttttcactacttctccatgttctctctgtccagttgtttatctccccacaaggctgaacttttgtgatttgcttttcattggtcaaacaagaaaacatttttttcctgttattccctcttaggcaccttggttacattcctacaggcttgggcattcagcaagatcacctgtcagagggcaaacttgtttgtagatggtggcattttcacagaacaaagcattggcctttctctgcctcccaggtgccttgggttgctgagcaagacacctctctgactcaaaagaaaaccacctccagttaggtgaaatgtgggggggttaaccatttgtttgctggtttgcgtttcccacgaaaaactcaaaaacagaaatttacctcagccatggaaagtgatgtgccaagcactgtatttgcatattaaaactgaaagcggatttgcatgttatttcagtgtcttgtgtcacgttcaggcatctgtcaatcccactagctagaaacaacttgtgtagtgggaaagtgtttctgtgcatagaagactgaaaagctcaggcctttcgctttctcaacctgtcctcagtctggattcccttggctggcctagtctcataccgaaaactctgaagaggagactagaaccctatgctttgaaaagtacatttgttattttccaaaagccattcactatactatattctaattaaatcattttaaaataaactgcttatattccatcactgatactttgctgggcttctaggattttgttttgttttgatgttcatagtcagtttctcatgtatgttatacactattttaatacactctgaaaattataatagcaagaaacatgggcaatctaagtacctaataacaagtgactaggggaaactcattttaaacaggcagcgtgttagaaacaaggccaaggctacaggacaggtaacagacaaactatggtgtctgtctcttaaaagtatagcttcttcccagatgcagtggtacacacttgtcatgcctgcacttgggcactgggtgatggtggaaagaggatcaggagattaaagccaggctcatggcatggcaagtgtaatatcagccaagattttatgagatgctgtctcaatgaatgaatgaatgaatgaatgaatgaatgaattggtgtaacttcaaatcaaaagcatccccccatccctgtactcctaatagaacaacacatgctatgaaatctttcttcacaacaaaggattaaatagctactgcactttttcaggccatcaaaataagacgaaaccttttcctctagaaagccattgctacctacgtaggctataagcaaggaaatggtttaatttgaaaatgcaaccatagacagttcattccatccattagaattccatgtcatccgtctttgttgggtgaaaataaatgaagagatgtccgacatttgtctacccttgttaatggcaaatctatttccatgaggtatcaagtctaactggtaggctagagactatagtgattttccccatcctggttttataggaataggttccattagcctcctgcagaacaaactgagagggatcctctcactcccaaggtgggcttgcttcctcctcaagaggcaccctgggaggcataagaacagcagcattaggggatacctgtggcacagggctgtgtcatcaatttttctgcatctgttaatggaggtacccactagttgttttttttttttttttagttcttctctcctggttggtgtggcatcattatttatggcttagatgcctggagaagcaggaaagggacagaaacattactccatctaacatgaactttatgtcactgatgtatgtttcaatgtcaaaggtattatatataggaaggttaaaagtttggaggtccaacaaagcgtgcatttactaacctcagtattaggaggcctgttttcaaaagtcctcataattattatgtaaattggtaaaacattctctgaaattcaagactatgaccctgacagaaaggtgggggtcactgcaaagaccagtgagcaagcgcttcactttgttcttcaagaagagcatcgccatggagctctaaatctcttctctagtaactgagcaggtagacttagtacttactatacagtgcttctttgtatgaattagataaattactccagcttgtaaatgaggaggtcagtaatagaaaagcaaattcctaagtgattaaaagatatcaggactcaaagtcagcataggcaaccttgaggcaattacctgtgacgtgggagactaagggtggtaactgtggggcatgagagccactttggcttgttagatggtcacaaaaccttggtgtcctagcactgcagctttctaatagatgcccagccttgcccttggatgtagtagcttttcagtaagcccatcttgctgaaatacagattcataggtcctctcctgtgactgcagctttggcttagggacaagagtgtgataagcagccaggtgtagtggtgcacccctttaatcccagcactcgggaggcagaggcaggcagatttctgagtttgaagccagcccggtctacaaagtaagttccgggacagccagggctatacagagaaaccctgtctcgaaaaaccgacaaaaaaaagagtctgacaaaaaagaggttgtgggttctgcctagcaataatcatgtggatccctctcctaccacatgacttctccatggcccacccctgaaacataacaggtatcccagtggaccctctgcccttggccagaaaggatacgtcatccctttacccagtgaggcattaagagtcaacctgacatctggtaagaatctagaagtagaagcagccataggaaattgagaagtgaaaacttgatacagctaaatgctggggggtggggaggggggctatcagaaatacagacttttttttttttctggcaggctttcagctttaaaatggggctaattctaccttttgaaaagaagataatttcaatgtttctttttacaagaacatataattgaagtcattttccttctgagagaaggaacctcttgtacaccattacaaatggacaagaaaaactgcgcatctttgctatccaaaatgatagagtattcattatcatggaatctttcagtacattttggctgctttttcctgcagttttatttgcctgcgcagtgctgttctggtaagattcagattcactaagttcaattgtgtagtactttgtagataagaaatcaacagcaggtaaggacacagaggaaaaatgaccaatagcaaggccatcctctgtaacctgagaggttgatacattggcagttagggagtgactgattcatcacatggatccttagagcactgagctacattgctattaggaagcttcattgaagcgagggggcattggcctgggaacctccactaggcatctcagtgagggctctttatcaagcattcccgttcttcagaagatatgggtcccagttgcacatacctattatctacctcttgtgaggctaaggcaggagggtgacagctttgaggtcagtttgggctgcctagataggttcaggctagtttggctacatagcaaactctgccacccccacccccactcccaccccccacatatgcccgttggtggaaactttccttctctgtgtaagaacagggcaaggaggataaagtggttaaccttcctaggttcttgatttcggaagccaggcgtagtgaaagttcagtaggctgcagaagccctgcaggctgccccgtgcttactcagactcagaacacagagtgaagctccaggtgcttcagaggatgctgacaagtggtttatgtcttcttataatggaaacctctgtactaatgaggtttccactgactcagtgtgcatctatttttgcagacgacaaaatatctctaaatatagagacatgttatttcactctcaaggtggacaatgacacatgctatattatcgtcacaaacacatggagttgaagaatcaagcaatctttgagaatgtatttctatgcatgaagaaactgaggcccaggaaatgaaaataattccgtaaagacctttagtcaagttaaagatagaaaaatattaaagatgccctgaatagtcggatatttgtgatcatgtaataatatacttaatcctgtataagactatgccaaatgcttcaagcataatgaaatgcaatgtgactatggtggatagcagttgctatttgccttattattattgtggcaatttttcttgttcagaaacgattatgtccttttgtatttttttcattattatgcaatatcacccataatactcccataatacttagcaaaaaagtagacttgcatatgactgtacatttggcaccatatgtcttttctaatgacagttacctgggcaacaatgtagcagtgcatatcagaccaagtagataattcgatcctttatctgacacacacactcaaacacacacacagagacacccacacttggaaatagacaaacacataaatagaataataccactcagtttcctatgacttttcagcactggccttttagtttatcagtttccatgttccctcttacagtgtgaaataactcagcctatgagatagagttctcttcattttccagtaactgaaggactaagcccctaccttcttgtgcctcacatggcaacttcaaactgggaatcagagatgctttctgtgtgcctagagacaagagagcaagttgagccaccacccagtcctgattgcatttgtaaatagccttgcaatgtaaaatctcatagtgttctctcagctaaaatgaagacctggcattggctgctgtcttccttacagctctttttccctctccatttcttccgtatgcagtgttcctgtgtgtccttccttttctcttcctttctctgtcttatgaaatctaatctatccttcaaatacaaagattcttgtcttcagcagccttctcctggcacatgggaacatcggaaccatgcctgtatcttagtctctacacacttttgtgactatctaccgtgggtcttattcttctacaactctttaagttgtcagaggttgaaacttttcattgggattgatatttgcagttcttggcacttagtaatttcttaggacgtgtatgttaagaaaagtttggagttgtctgaaacctgtccacttgacaactcacctgcctatgatgttcctatgtctttactaagtgattcatacatttcaaagaacacacatactgctgattaatatgagtatttaaaagaacatctccccccccccccagaaaatgataggctgatttaatttgttccacactgagcagtaaactttcttttatgtacataaaaatcttggcttatactagagtaaatagatataaatctaaattgctgttaaatactgcagctggaagggcttgaagacaccagtagacaacattgagaggcattgcattgtagcacatatacaaacttggtccaccgtggagtctgatctgctgtttctcagagatggtgctcacttacccacttgacctgtgcagttttcttatccttaaagcagtttgcctgtcaaacagggcatctaagcatctaagattagctaaatgtgaatgcaaacatcctggaaacagtcatgcaagcgagggatcctggaagcaggtaaacatttcaccaccactgttcacatttctacttcagaagcaccaactcagaaagcagtgggagtcatcccatcccagtgactcgttcacataatacaattgaatgcttttaccctaaactgggctatgaattgctcatttgaaaattaatgagttgaacacagctgtttggtgtcctttagacatcatgagcactaatctctattagaagggagaaatttcggagataatctgcctatcagagggagaagtaaagttgaactcaatgccctgggctctcttccttggggtaaaagccaccacttacttgaagactctggtggtttccaccatttattctacaggtggtcagcattagacactggatgggaaggtaggagagtctcatagacaaaattcagaaataccatcaaatcatctagatcctttctcataacaactaatgtatcagattttgttccttgcttaactggggttctactgtcagtttttcatttttgttttgaaatcaggcatccattctatagaaagcacacaaatctagggtatgtttttccccccaagctaataatattctcttaagatgctgtgcagtggcactggggcagagctcttactgggccacatagcacatgacagtcaatgcttttagtacatacaatgcccagcatgtgaggtatataaaaggctccttttgtttataatgttttcaacttacaaatgggtttatcaggacatatcaccctgataagtcttgatagcattaatatattatatttgtcttatattaatacaaaaagtagaatttaaatgggaaagaacctttctaaatttggcaaactaggcaagaatatttgaataataacaaaaatagcctttccacatctgtgaaatactgataagactactttgatattagtctttttttgaaatgtaagtgctaaaggtagaaaatctaaatttctgaacttgttttgtggaagatagatttaattttttaccgcgtgtttattgaaacctagactaaaacaataataaacaatacctggttgaaaggaaagtgcatgggtggaatttgggtttagatgccagcataatccgggctcagcctcaccttttattgcacacctgaaggaaagcaactgaccccttttccatcttcactatttaattgtgtaggccatgcatggtaggtcaaccatactcctgttgtagacccaacacccaagggtgtatgtgtagcacatatttgcttgattttttaaggggatgttaaaagttaaaaacatagggaagtagggtgaatctagggtgatttggggtgggataagtaggatcaaaatacattataattctcaaagaattagtaaaaatgagggaaaaaaacaatgaaaggataaactaaaaaaccagcaacgcagtagtttctttaaggtatactgcaatgcttttagtgcaaaacaacatctgcagttgagaagttgctctagatttaatgtaactggatggtccagcatggtgtcttggcccgatgtcaccataactagccctgccctgatcttttggcatttcagctttcttgtctcacaaagaagagagcagctggcacaggccatggtctgtccacttctttctctaaagtaaatattctaacggggaataaaatcctctgagaaccagagtagtggcctaccaaagtgtttcttgggatttttactctgcatgtctgtacttcacatatatgtatatctcaaacactagaaaaatagtatagacaaaggactaaaacgttaccagtgaagtattattcatgttgtgaaggcattccatgccttcagcatcactcaaacaagtgaaactagaattaggcatgacaacatcttgaagtcatatatagtttacagaattttcatgcctgataactccttgtatttattggacatggtgagagaatgaatgcacggcttggggcttcataggatttaatcttctgtgatgctgaagagtgaaagtgtcagccaactatttcaagagtgtgaacaccaatcgagcactctccctctcctcccactgagagtggaccagtggtatccccattgctaaactatcggtttttatttcctaattaaagattctggattgataatgacatgttcaaatgtaagaaagggaaatctggtgagctcccttatgcgtatgtgggtgtaagaagttttatgtagcaggaagctactctgctgctaccatctgaccgtcccttctttgcacgtgctgggattttcagtgattgtctcagggatgctctggcctgagttcccatcctcttacgctgccgttcttcagtctcacctgcctacgttaacactactggctacttcatcctatctcatgtctgcctacttacagctctaggaaggaaaattgtgcagcttccttaagtaggaccaaaatctcttcgctttctagatctcaggaccaataagattcatcttatttcccatcttaaatgtatttgaacaggaaagcacaatggctgagagcttttttattgtacctgagtcccccctccccccttgggtttaagaagtcttatgtatttttcctctttctctgcattctctcctaggaagcttcccttaacccctgacagtgcactttctactgtctttatggatgtgcctgcagactttcctctggactgtattgtctttattggtcatcttgctaattaatacacaagtgataacatgtcaacttcttagcagttattgaaatattagattcctactattggatacacagattctaaagtgtgatagactcgtctaaaaaaaagaagtaaatggagtgaaaggccaaaggtcagacactgttgaatgcacctgtcctactccttcccaggacaaatactcctcggttaggctgattgctgcagtggatgtctagatgacaatgaaatggttgaatgctttcttcctttcagggtggataccctgggcctatggggcctccttccatccccccatcattccgcccagaagatgagctcgaacacttgaccaagaagatgctgtatgacatggagaacccacccgctgacgattactttggtgagtggggaagagagccgacttgtggagtaaattcctcatttccattttgctagtgagcagtgaggactgtatcagctcctctggagtagtgttcacatctgctgcatctgttatccacataccagtgcgcgtgtctgagtagaccaccatgaacctcagtggtggatagagttattagacatgtaaaatcaacacataattttgccagtttattagcttagcagcaggcaaagatttatcatcgtgtgtccaagtagctctaaatatttatgtctaatacttggaatctgatgtagcttaactgtattttcaggtcttacattaactgaatagaggaggaaaaaattatctttgttttccacttcttctctcttcaaacctatgaaaacttatgaagtgatgttgttcttgccagtctattagtataagttggaggtatgtgtcatttgtgagatgctatggacacaacttgtcaagggaacctacaatgcaaaagggatgagacaagcacacaaatgattatgagtgcgtagaggagaagtgagagtcctgtgaatgctcagatcagattggacagatcgtcaaccatcgtaatatagaggttgtttgtccttcagtctcataaagaatggtatttttgtagcatctaagtaaatttatttctgtgaaaacaattttgaaactgcaacatattaaaatgtgtaaaatacgagaccaagtttgactattacattgaagagatgctgagttaccaattaaggtggtataatattttctaaacattcattctctgttttgtgatagtcttatcacaaagtgctttctgagtaggttcttgaaggatgtggagagaagcatcatatgggtcgcagtaatgagtaaaggctccgccaaggtagagaactgaacaggcttttgcctcctcaagagcagttgccttccatcttgggtcagctgtccatgagtgctggaactgttaagccagccttaccttcctcaccctgggacaagcctactatctgcctgtctgacagactgacaccagtcaagactacaacaggttaaaggtacatgccaccaagcctggcaattatttactccctagaacccacacagggaagtggaactgactcctgtgagttgccctttgacctccaccagcatactgtggctcacacatccttcatgcccgctccctgcacctctgaaccacaaataaataggcaagtaaatatttttaaaagtaatttttttaaaataaatctacttctggttccttctgtgtgcccagttagctcagtattgttagctgttcccttatcacctgagcccagtttcctaccctgatgattcaaagatgtggaaccaatgttccctagcattctttgaacactagaaattcactatagaaacaacattaactcaaagaaagaaaagcgtaaggcttaacataaagattatgagaattggcacaaatgcatggaaatagtaacacagaaaccaaagcttaaagcagagcataggaaaagtttattgtgctctcttcattgtaataggaggagggtgtatattagaatccaagataaactaagttaacgatgaaaaataaggtgtctgtaattaaagaatattaaaagtgaaatgctgaattctgagcatatgtttccgatatcgtgcaacaatatctgctgtaataaaccgagcaactgtatcgactgtaacaatggataagtgttacacactcaggaaaacagataaaaaacgatcccttagaactaccttagctttacgacatacaagcttcaaaaactggagcaaagtgttctgtgagcctctgttggtgctgttttatctacaggatggaaacaatcgctatcttatattgtgattgtgagtaatgcatgaaatatttatagaaagcactcagccaagtccttggcatgtagaatgtgctcaataatcagagttcaccaaagctccaggggcttacagcttatttaagaaaataagatatccctattaaaaatctatcaataacatttgagtgaaatttaacttgtagtaacaataaaaggtgcatcaccagccgtcaaagtcatcattgccaagtggaggctgctatctgtgagaggagaggagagaagggcgtggttttactggctgtttataatatggtagtactattttatgaacggcagaaattaactgtaatttcatcttacagaagaatgtaaccccttggagtagatgttactatcatgttcccattagagaattaaggcccaggaatgctaagtgattttgctcaatatcaacaaataacgagctgcagaagtaggtttcaattcgtgtgccaagcctgtgttgttgagcaccatgcctgggatggagggaattagagcaaacactcagggaagggtttattggggagattgcctttggagagttgggcaacgaaccatgaggattctcttctaaatataaaataagcggaatgtaagtgaagacaggattgttgaaagatagcgtcctctatgtggaaaacctggaagtggctctgtacaggctgctctggcagcgcctgccccaggcgtgggttgtatctttgaaagtgtgtatgtcccagagggggctgtgaaaattatagtgtgttactccaacaagaacaccaagtgatgcacagcttcatccacattcagccaaggttctgagagactccaggaaaggaaggaagatctagaaggagccacagaaaggtactagggaaagattaagcttgaaggagtcatcaatcttagttcaagtcatttggaaatgggtcttagttcaatttggaagataatagagaaatgcggtgttttctgatggagaaacttttgatttgaaagggggaaagtaatggaattgaagcctggtacagaagtggaaaatactgggcaacagttggcccaagtctctgaaaggtttctacaccctggctggtgtggccttctctaatgagttgcatgctgaagtctagttccatgtggattgttctgtggagaaggctcaggagcatagctgcagggtatagtttaaatgacacctctaactctgcttagcaatgtgaagtcgggagcagaagtacttggtgtagacctgcctttagcctcccagtctttaaatatggcctgttaccatcttggctgcagagaagcagtgccacgatgggtacagacaggagaagcacggggagctaaggtgatgctgtgtgagtgggagaagagaggtccatggacccacctgaaagatggaggagggaagatgaaatagcactgtttgcatcatgggtgtggccagcagaggaagataatgtcttctcttgcttttcctccagaaggaggagagaggaagcagaaagaacttggagactgtagaagattcatttcaccatctattagaagcaaggctgcatgcttttgctcgaggtcatatcccttggagtagtctgtgttggtgtaaaactagcaaagggtgtgtttgtttgaagggagcctccactccagtggtagacgcttagagagaccaaggggcaaagaactagaaatcactacgacttttgacggattgaaaacttaaagagaactttaaaaataggtatcaaatggcagaactaagcagcaagcatggccactgttcaactccaagcttacctcgtgtgagtagttttcaaggaaagtgtgaaaggaatattaagctgtagaccatcttggaatggcttctcggggttatgtgagccttctatgttgcctcacataacagacttttattttcatccattgtgaaaggaaacacagttggctgtccatttggaaaggaagcataatttaactgccacacgtgcacatacactctcatatgtgtgtgtgtgtgtgtgtgtgtgtgtgtgtgtgtgtgtgtgtgtgtgcaggtgtgtgtgcaggtgtgtgtgcaggtctgagtgtctgtctgtgtgtgaccatagcatggcttcaaatgaaagttttctgactgagcccttcctaggactgaacacaaatttgttggaatgcagaatctctgaaagtggatatactatatctgagagtggatcgaaaatatctgtcagcgtattttaagcatgtaatataattatcttggcattgtttacatgctgttgtcttattccaaaaaagaaagaaagaaagaaaagactgaaatgtgtgcatttcacatttttttactaggctatttgaagaatcactatgccttcacagtagtacaaggtaaaatcttgtgtaagagaatcttgtattaactggaaggattgctagtggaaggcattgaaaattctttgcatggaaacaggactttgattggaattgggttttactttccttccaaaagatacttggactagagtggaaggtatgaggcagcaaagacatgacacttgtgttaaatcgaagaggaagaagacagggatggtaatacactgctattcctgaagtgatgtcgcctgttcaccacacttagtgctaaatatcttcccaaatgaagtcaaactggaggtccggtgatgttcatgaatcagctctagaatggaggtccagttcctccctaggttcattggagcacgtggtagctgaccatatccacaaacattgactgcatggttcaggagtctggaaaatatgatttaggtgcatttgagattttggagggaagaagccctgggacccttcctgacaattactgaaagagagtcacctgtgaaatggacttggccaattctaacagagctatggggtgagttgctaaattcccattcagtgtggagaattaatgctgtgaacagacaaaacgaaatctctgagaagtacaggtgaaaaatcaactctttgatggggaagccaatgaaatacacatatgctaatatatcagtacatctttcatccagtgtccacgtccgacattgagtgacttagttatctaaaatcacccttagctgcaccttcaaagtgagtctacaacatttagttttaatcctgtgttcagatgattaaatgaggccaggtgtggcagttcacacctttaatcccagcacttgggaggcagaggcaggtggatttctgaattcgaggctagcctggtctacaaagtgagttccaggacagccagggctgcacagagaaaccctgtcttggggagatctatagatatagggtagagatagaaatctgagtcagagtaaagattttctggcggttttaaaacacttacatacttcttgcatcatctgagttagacaagagcctgggtaaggggttaatatgctcattttccttggtagatgaaccagatgatcatgagcttccctgctctgtggacgccatgctgccctcatcagtcagagagctgacaagaagcagaatggccgtggctcagacctcactctggagtctcttccctctccttcattgtgctctcttagaacgttgctgagttggtcatggtgcagcttagctcagttagctgtgtttgagcttccagatctgtacaaagagccgcgtgattgctttggaaatcgcttggcaggtcttaactaaggtgctgagtgatttgaacctgattgtcttcattgttgtgtgacaagaaaactattcctggagtgtccctgttgattacagacaggggcctgactccaggtgggcagtttcctttagaaaagctgggacctcaggtcttgttttcacacacaaataacctaattaagtaaaaacccaaaaccacagcgttggagaaaaagtagaaaatgggtggtttagaaaaaggtggtactgatcagaggggaaagttggttttttggttttatttttttccctttttgaagtagctatgggtcatgagagtacagtggtgtttcgttagacatattaggtgtatctcctttatggtgataactttttgtgaagtattttctcagagcaatttgggcttatagcactaagtcatttatgtcttccaccatagcatatgttaatttttagtaaactcagccagtatgctattaaaacattgatttgaaacctaagattcatagggtttttttaaatgtagtcctagaagttttgtgaaatagtttttcattttctagaaaattaaagctcaaatcattcatccaaggtcatacaactgagactgatttgaaaactgtagatagaactttttttttctttctaaataaagagtagaaattaaagctacagaaatggctaggttagtgctagtgcctgctgtatagacatgaggatctaagttttgacccctagcaaccatgcaaaattctggtcacactgtacatggttgtaaccccagggctgggtgggtgtgcaaaagtagagactggagaattgctgtggtttgttgccttccagcctactgaaaaatagcaacttccatgttccatgggagtaagacagaaataaagggtgtcacctgatagcctcttctgatcttcacatgtgtacctgcatatcttgtactctctcactctctctctctctctctctctctctcacacacacacacacacacacacacacacacagacatacacacacacacacttaataaaaaacaaactggtggtagaaatggggaaggggccatccaaaggttaagaagcacattggaattgatgtttttgcaaacttgatctggatacaccattgctatactcaataagaatgcatttgccattataaataatgaattaataacttgctggtatctatatatgcacattgtcctgatcttcttaattttcaaatacaaaaatatatcattgcctctatctcaccctttacaaatacctggctgtaccttttgtgtccttcttcctcacaagtgtatagatgcaagggtagtgcttacttcacggtagtgccccatcctttatgggttggcaagtgagaaatgagaatgataggttggcagttgctgcagagtaggggtattcttccactcatttttttttatcacctttgaatcataaaatgttagtcatgcaaggtacctatgcctaaggacctgctacagatggggagaagaggaaattcatctcactcccccacctcagggtcacaaggcacttagtgacacagccgtgaattataacccaaattttatcatttctttctttttaatcacataaaggcacaggagaatatgtgagtagagttgagatgttgttgctacattcagtgaggttaaaattgggctgacaaccttggacttgatctcatttccatgtgtcttctgtgaaatccaggaggaaatcggtagattgaaagcttacatagttgagattttattcctaaagtactatatcgtattttactttatactgtttcctctgtaacctttggctcccacaagagattcttgcctctgtaatttcttcctgttgcaaaagaattgggtcagaagacagggaatcaaattgaaagaagtatgtccccatttgtacataggctgtctatagcaactgttctaaaaaggtcatccttaaagtagctccctccaatgccatgaaccaccatccaaaactgccattttatatggacttgatagaaacaacataaatctactcacgggattacagttagcagcatccattttatcagaattatgaagaaagtaaagatactcctacttcataattcaacatcctttgatgataagccatggaagcaattggaattctgaaggaagaaagcactggtgggccattatgtatggcataacaacgtcttacttcctagaccatacacagtcttgtattgacatgaacgtaaagctgagtcctgaagctacaatgctaattatgcattttctgaccttacatcccagccatcttttaatgagaacacagctgcctttcccctacaattcgcccttcctctctacaacctgacctttccccctgcctgtcccctaaagcacagagatgatgatcttcttgcagatgttgaagtgacatcaggattgttggaagacaattaatttaccatcaagctattgtttgaacatctgtagagttatgcttagtaattctattgtgtttttaattaagcaggttcattcatctacaaatatttattgagcacctactaaccaccaatcattgttctgtgtacctccggagatcatggaaattaggtacattagtgaccaaagaggagaggcatttgttaaatcctcctctgtcaaaggctttaatgtagaacaaagttgtttgcttcagagttccaatgtaacacaagtcagtttccaagaccagttatgctcattttgagctacccaccccaaccccgttccctggggtttatgaggaagatcactgcatcgaaagatcaagtgccaaggaatcagattaaaatagggttgtagactatgacaaagcacagcactgatgccatacacttacttaagggcttctggggtcagtgtcactaatggtacttggcataaataagagatactaatattgctgaccatcaatgtgacattggtatttaatgtaaatgatacagcactgtcataaaaaagaacaagtcatcatttgatggatggcacagaggaatgagcccttgatttggaggcaagtaatccaagcataagatgggtctttttctctgtgcccctgctgccatttgactttttgtgctgtccttaggatgtattcttatatgttaactgagaacatgttagcagtcttcagattatttcccagaaaacaaagacacagaagtaactcagcttgcagtatagctaatggtatggtacatgaggctctgagatcagtccccagaacaagagagagctaaagcagagagtgagagaatgaaagattcaggggtaaggctccatcacaggctttcttaacttttctgggcctccattagaagattatctattttatacacctattgccagaataatattaaataagtaaacaaacatgtaaatgtgttatacaccattagtagaaccctcaaaaactaaagagatgttagcatttcctccttgggctacatccagtttgatttatggcatttgaaattagcatatcataatctctctgattgtttcatgaattaatgctttgtgattttataaggtgttatcttgttactcttgttactggagtatcactagaggatctaagacgtgggttttactcactctgtgtgagaaagcaacagcccaagatccaccacagtgttctcatttgctgagcaaactactcttgctttttcatgtggaatgcagaaaactattgaacaaaaggacaaaatgaattttgactcagatggtacaggatgaatcataaccttctttcttatctaagatgtaaagaaaaaaataaaactaatgcagtagatggctgtgtcagcataatccagacagcctgtttttcaacagaacagagaatacatttctaccaagctgagaattgcaggtaggacaaaaacctggttaaatttttttctttgttaaaactgtaatcaaaggatctctatgtccttgcttcaagcaagccaatcagagggttctgttcccaccagcaaatattgcccagactgttcataaatccacctataatcccagctgagcaattaggggacagaaaattgactgtgtacttaatgtgtgctccccatatcagcctaccacgtggtcagtatgggggatataccatcaaaagatgcttcctaagtcatagtgttcttggccttattggggaaattgtttaaaataaaatatagaatttatccttctagagtctcgacccagatttattatctaatcagttgcctgtgaatgtaatgtaaaaatattctttaagtaaaaggcacttttaagacctctgttttctccaattgttcttcaatttacaattctagtgggtctcatcatggtcctgtatgtatgtgtgagcatgtgtgtgtgtgtgtgtgtgtgtgtgtgtgtgtgtgtgtgtgtctgttttacatgcctattgatctacttactgatttgtaacattccccaggaaagactacaaatctttaagttgctgtttcttcttcaaaaagcaaagtgagcaactatggtgtctttagaagtcccatgtcactccatcaaggcttttgctctcagtagatattccctagaatagttctattctaaaaacctgcactattatctctggttaaaactggaccaacatagagtaagcacatagtctatttggaacactttaatttgcttttagacaaaaaaaaaaaaaaaaaacgaaagtactatgtatcattactgtgaccctttgagacagatgttcttcttttacagatgataaaatggaggcataagcaagttaaagatgtttcctaaggtctatcaattatagttgctatttgagcccacagcctgtcttttgacacctgcatatattgactctatgaccacagctggcagaagggattcaagtcatcgcaaaaccacaactgtgctaatatcctaacccatgtctccctttgtttcttctggaagatgtttcttagagtactttcgtttcctctggttgaagggccccacaaatgaccaaggaagtagatgggaatccagacctgccatcagtctctttgccctatgtcaaatgtctgcagagacaaagaattaacttgtctaacaaatgttcagtgttcggattcttgatgggaatgtacctgagacctgtatcccaattccttttctcatcttaggcttgactgaacttggctattcatgttccagctgagaaactctgcacactgtctcagcccttctttcacaagtggacataattacttttgatttttagccatccatctcagtgatatcttctaagctaaggaaccttttaaaaagctggtccagtccacaggcaaactggaagagagagagagagagagaacaagggacaaggatttcatattgaaaataaggttaccctgttgtcatgtccttagacaaaggagttcaatgcaatagctagcaattggctcgctcagtcggaagttgatgctattttaggtcatcagcaggagtgtcaatgtatctgtgaattttggcattttgtttcattaaggtggttcaggaagccagacactgattaactgattattcaacttggttcccactcctaattttggatgtgtggtgtcttcaggcagctgttgtgacaccctgcttctaaagaaaactttgcttgtgcctctaaagcaattctgggaatagtttaccccacatcctactctcctggattctctgcatctctggtgacagatgccatggagatactgttgcttctggatcctggcatttctaggaagtaccagggccatccaaactgcctgcattctcactggtacactgggctcaaagtggactttcttatggaaattacataagaagatgcccatgcctcagcacgaaagtctttctgaagggaagagaaaccctacccagaccacaggatgtgtatagggaagactaggaaaattctagactctgctggtaagaatttggaatctgattctctctgtaagtgtgctgttaagtaagcaggaagggcaaggatttctattttggaaacctaagtcgtctttgtccatttgtttaatcactgagtggttattgtagacctattatgcgccaaacattttcactaagcattagtctaaaagctgagggcagaaatgcctactaaaaaaattagataatgaatatattactagagatttgtgatactatggaaagaaaaatttttgctgagattgaagccacaggtaagtgttagctcgtgtacattgtgtcagagctaaatagtaattaaatgtttcaggtaacccatttccaacaatccagtaggaacacagggagaagaccaacagagattgtaaagcatgcagtacgaatacagaaggtgcatggaaaagagaaatgagaccaaagggctgaccgatgtctagatagcttgtattgtagctgctctttcaaataagtaaagaccaagatgggtttctttctttttttttttttatatgcatagatgtgatagtgtcagatacctcagaactggacacgtacagatagttgtgcgctgccatgccataaattgaacccttgttctctgaaaagcagccagtactcctaaacactgagccatctcttcagtcccatagccaaaatcttagggctaattctggatcctgttgtggggagagctgttgactctgtggaagcttggagattggactgtgctcatttgcaccaatctgaaggagacaagagcctgaccagagcagctgaggtttaacaattttgcagggccagtgacgacatctgggtgaggagaaagggcaggttaaggttcattgctaagcttctgtcttaggtaggaaaataccattaagtgcgatgagaaaacagacttagtagtggttgtgcacgaacctactaaggctttcctatttggaagtagtttaattttcatccatcagtacttattgagcacctgctgtgtacacttacacatcatttcacattgttacaacaacagagtaaaacagactaagtcctaagaggctcacattctagtaagtggagagagaacataaataagtacacactgagaatgatagacatagagggccatgtagacaacaaactggaaagggtgacagcacactcatcagtggggacgaaacagggcagagcatggtgggtggtaggacagctgccaccccctgtggtcagatctcctgtgtctaatattggtcctgatttattggtattatcttataaattgtgtacttcccctgagacaggaatgcatacaatgaaaacattttcaatcacacttatttctatgtagcaatatattcggccaacataaaatatgccaggagaaacaaagagagaggaggaagacactcccccatacactcatccttgtttctctaaaacctagggcttgaaggtaagaagccacagaaaggaacccaagatttaatccaaatctcttccaaggatccagtttgacatgacaacgttccactgtcacctccaaatgtgttgggatgttttgtagcactcctgggcatgtgtagctcatggcagacaggttgaagattgacagtgaaacctgagagtagtgagcatattagcataatatcagggctagcagaatgtcaaaaacttaggtaatttgacttctcttgcttgattctgaacttggaaccaatctcaaatgataaccaaaggtaaaattggcaattgccagctcagatgttaagatatttcatatttgttggatcactgtaaatactgaagcaaagtataagacaagacattggtatagtgttatattcatttaactgataggacgctctagaaaaataagtcaagatagagtaatctgaagttctttagcataaatggaatcctagcctttaaagatggagacatttcttgtccatttttctccatttagcacaaaatcagcccttaataactgatgaccatttatggaacactgattatggactaagcactttattaaatactttagtaatagatcatgcttcatcatgccggcatagtaggtagtcactcagatctagtatatgggtgaaaaagccagtgctaagacagttctaaacctggaccaaggtcacacagattgttaggaggctttctaagggaagtctctgttctgacttgcttaacaagtaagtgtttctaatggagccacttgtcctcatagctataatgttctacaggattctgccatcagtaccatatactactgtactttctgtcagtcacatggttatccaaggaatatcaaaccaagattgttggaatggaaagggtccagactttttgggttctaagcatgaagagtaagaatcatccaagggagcaacattttcatgagacaaagctatgtgcccatatgcgctgtacatgtataagtctgtatatagagagatgatagatagacagatggcagatagatagatagatagatagatagatagatagatagatagaagatagatagatgatagatagatgataggtagatagatgataggtagataggtagagagatgatagatagaaaattaaacagacacagatatccttaagcccatacccactgacaaattttaactgactatggcatattcttagttataatagaattaaaatctaagttgagaattactgatcaagtttcatcttgtcacatcatagacccgaagacagaaacacactggcaactactttcagaaggtcctctgtgacacatctgtgtaaggaaccctggttctatgactttcactaatagtgattttcatttttatttcacaaaacgatatttctggattgcatcatgtcttgcttcatggttgcggtggaacataagcgagcaggcaggggtttttactgtgtctggggtcccatgatagatgtgttggtaagggaggatgtgttcactggtttctgctgagattcacctgttcactaatgacagctcctcagcacattttcatagtggtaggtccgtgggctgcatagttttgtgtgtgtgttttcaatttcagttcctttgataactgagcaaataacagagatgatgaaaccgaacagaattaatctcctagattgtgtgtcacttctccttttcagtgagtcagtacgtttggtaatgacacgggagattagaaggttgcaacgtgtgcctcagtgaatgcttgtgggaaactcactatttgcccatcacagatttatgtggagtgaatgagagttttactgcacagaatatccaggatggagaaaagataaataaatttggaagtctttgccctcaagaaactcatagactgtcacaggttagacaaccaaaaatgtataataaccctttccctgtgaggtatctgtgcatatgaccaaaggatgccttgggacatggaaagcagtggtagcttaagggctgatacctgagctgcatctgtaaggaaagactcccccggcccctgtagaaaggagaagaaaggcatgataaaatgaagaacttggtagaaaggaaggcagggaaagtgttccctcttgagatagcagaatgtcttcagcactaacagggtgatgagccagcagtagggacgtggaaggcgagacagtcagtgttcagcgaggagctggtccatgccactagatctgtgcttgatccaggagagaacaactgttcctgttgccaagtagcactgctagtgactgagatgatctcacagaggcacctcgtggggcagagtacagacttgccaggtggaacagaaagatggcattgctgtcttttactcacgcttcaaaacaggaagtgcctaagtaagcagcttttcggatcaatgcagccatgctttacctgcccttgggttcttccgcatcagcaggactaggggcatactgctgctgtgcaaagatgccaccaaatgcaacagaaggcagatcacccaatctttagaagtggaaatgtatatacatctagatttgaatgttgcttccaagtttcaacaaaaaggcaagctgtcagaaaacccctcacatgtgtattctcaactgagttcttgtggttttttggtcctggtgcctactgaagagtttgtctatgtttacaatggaaaagaccttgggagccatctccaaatcttgtttgtttgtttgtttgtttgttttaataaaactagagagaatggctccagccatcattgggagcacgcatgtgatccttccattcatgtggaagcctggcttccttttcatgctgttactaatcaagtgttcattagtcatgaattagtgagttatcccaaggcatgccttgatatcacagtccctgttcactcgcgcttatttagtacagtttccattacctagaatatactgtggcttacatatattaagtgaaaaattctagaaagaaacagattgtaaggtttgaatggcatgtcattgtggggaacatgctgaaacctcacaccgtccttcttcatccagtcaggacatgagcattccctggggcctttgcctcacatgacacctgtagtagcccactctaccactgctgataccaggaaggcagtcgtactgtcagaaagggtatggccagtaactttattccatgtagatgtggcctctgaataaaaccaaaggtgctgctgattcagacatgccagaggctgacagctgcttccaataagtgcaaggtgaaactactcatgctaataggagaagggggaaaacccgaatgctgagactgctaaactctgcagaaaaccgaatcttagtatccagggagaaagtaattcatgacgatgtttctatcttgccttaaactgcaaaaattatgatcgcagtgagtaataaatgatatagttctgtactatcaatgattaggggcatcaaaggggacagtctcaggatgaaaatgggcacgtactagagaaataagaaagacaaaatagctaaatgtttggtaaggatgtgtgattgaatttatcatctatatgcttggttccctccactttttatactaaaaaagatctttgttctttatttttctgaatttcatatgtatgtacatatatgtgtgtgtgtgtgtgtatgcaacattatcatttctgcaccccatttttctccttaaaacccttgtatacaccccccccacacacaagatgccttccaacttcatgtctttttttttttttaaattcattccagttagtgctgtgatatgttcccagatgtggggagaccatccactggtatatgagaaaactaccagcatccataccctccataaagacacacacacacacacacacacacacacacacacacacacacacacggcccagcgactatcttgcaagctgtctgtagttcctcagcatatcatgaggccctgggaaagatgagctgatgatctccactgccctttcaaaggggccttaggttagaaagggagcttggcccagttgagacccttagcctttctcacttcttctcacactggctcaataaagtggagaaagaattttattgatgatgaaaattgtatcagtattttttttatggtgcccaaaacaatcagcattgttttattgttttattttcctattgatacagtaaattactacaaatgtggggcctacagcaacacatatttgttatctcactgaatgtatcagaattcaaggtattagcaaggctccattactttcttcagccctcggaagcagtcctgttttgccttagacctctctcgaggcttcggatagcccccagcaatggcatttctgatcattttttccactagtcacatgtccattgatcacaccttgggaagattctgcaggttttaagaaactaactatgtcattagattgtgtccatttggatctcttcagatactctacccctcaagattacatttgccgaattcccaggaacataacccaggtgcccagcgttaagacagtcctccttaggtgatttaggcttgtgttgtggccttccagtaaatagctcagtgacctagagatagcaaagctggtgtggcctttggagatgtaagaatacccatgttgtttgttaaaggatcggattcttgctttaaatgctaatcttggaaaaaaatatttctgacttgtaatttgataaaagggcttctgattggagctgcagctgtggaaaacaccattcttacttgacctaaggccctgacgataaactggtacttccaaggaaagtgggtcttgttttttttttttttaatttttttttttttaagatttattttatgtattcaccaaacctcttcagacaccagaaaagggcatcagaccccattacaggtggttgtgagccaccctgtggttgctgggaattgaactcagtacctctggaagagcagtcagtgctcttaaccactgagccatctccccagctcgaaagtgggtctttttttttttttttaattttttattaggtattttcctcattttcatttccaatgctatcccaaaagtcccccatacccacccacccccactcccctacccacccactcccctttttggtcctggcgttcccctgtactggggcatataaagtttgcaagtccaatgagcctctctttccagtgatggccaactaggccatcttttgatacatatgcagctagagacaagagctctggggtactggttagttcatattgttgttccacctatagggttgcagttccctttagctccttgggtactttctctagctcctccattgggggccctgtgatctatccaatagctgactgtgagcatccacttctttgtttgctaggccctggcatagtctcacaagagacagctatatctgggtcctttctgcaaaatcttgctagtgcatgcaatagtgtcagcgtttggaagctgattatgggatggatccatgaatatggcaatcactagatggtccatcctttcgtcacagctccaaattttgtctctgtaactccttccatcggtgttttgtttccatttctaagaaggggcaaagtgtccacactttggtcttcattcttcttgagtttcatgagtttagcaaattgtatcttatatcttgggtatcctaagtttctgggctaatatccacttatcagtgagtacatattgtgtgagttcctttgtgattgggttacctcactcaggatgatgccctccaggtccatccattgggctaggaatttcataaattcattctttttaatagctgagtagtactccattgtgtaaatgtaccacattttctgtatccattcctctgttgaggggcattctgggttctttccagcttctggctattataaataaggctgctatgaacatagtggagtatgtgtccttcttaccagttgggacatcttctggatatatgcccaggagaggtattgtgggatcctctggtagtactatgtccaattttctgaggaaccgccagactgatttccagagtggttgtacaagcttgcaatcccaccaacaatggaggagtgttcctttctccacatcctctccagcatctgctgtcacctgaatttttgatcttagccattctgactggtgtgaggttggaatctcagggttgttttgatttgcatttccctgatgattaaggatgctgaacatttttgcaggtgcttctctgccattcggtatttctcaggtgagaattctttgttcagctctgagccccattttttagtggggttatttgattttctggagtccaccttcttgagttctttatatatattagatattagtcccctatccgatttgggataggtaaagatcctttcccaatctgttggtggtctttttgtcttattgacagtgtcttttgccttgcagaagccttgcaactttattaggtcccatttatcgattctcgatcttacagcacaagccattgctgttctattcaggaattttccccctgtacccatatcttcgaggcttttccctactttctcctctataagtttcagtgtctctggttttatgtggagttccttaatccacttagatttgaccttagtacaaggagtaatagagcattggaaatgatactatacagaaacctggccaagcttctccttggcatggcccattctccttggtacgggcttcctcctccattcctctggtcctacccccctccttcgttattttcattaacaaattcagggaagaactgcaggaataaagatgtggggaaatttaatatgttaaagaatgaacaggtaactgaaagcaattaggaggaaaaattgcccgcccacccccatcctgcctgatcagttttgtttcctgagaacttgtaagtcaagttctagaactgagcagtggaaagctcccatctggtggaagactagcaagacctgagggatgtaggactgaagctctctgaaagaacatgagcatcctagcaggagttctctcagattaggacgcaaacatggttccctgatggaactgtttctctccagcagtgagaagcaggtcataggaagttcggaaatgaataaagttgttctaagatctagaaagacgatgagtgaggagtgtgttctgcttaaagatgagctcgagaggacccgctctcccacgagctgcagttatttcattaccaccttattgccagtcaaatagagcattatatcaagcaagattggtcattcaaaaaagaatcctaagaggaatacagcaaacttttccaagctgcctgaattagattacattgtcagaaagtaagaagacagtgcattggctataatgttgttgtgcatagattaagctttggggactataaataaaatccttttaaggtgaatgcctagtgttgtggctgctctttgttgttgtcctgtttgttccattttgccttaaaaataaggttttcctctcccttgggtgagggatgagctagacaagcaatagattagtattaggttgtaaagtggctggtccctaattgttacacttttgttacactttgtctgttttactcagcagcaatcttagtctgcatctgagactctcttgtgagcatgagtagctatgatctatggggaaccactcctgtgtggccgtgttgggaaatggatttagagtcaggagtttacagtctatcttcagaatttttgactttccttcaccaaaaaagcaagcttgttcgtgtgtgtgtgtgtgggggggggggggggtatgtgcttacagtgtgtgatagtttcccaacttttaacattagtcttacttactacaatatattgcttagaattagttcaccattcagttttgcagcatcatagtctgagagttagttcaaatggtttaatttgattacacttaaattgtacacaccactctagctttatatgcaaaccatagggctgagactattttactaaatttaaatgttttataattcatttttccatctgagaattacattttgcatataatttttaatgtttttaagttccatttgaaacttattatcaacatacaaattcttgacagggcattaaaaaaactggtccagattattgctgagttcagtgtttcgttatgtaggaacactgaacacctttggttaactgggtattgataaagcttagagcagtgttggggggtcctatacactttggcagctgccccatggcagatttgacaacttctagttccttagggacagacaaaaagttgcctctttgccacctgtgattaagtaaatgtttgagagtccgagtcctgagcctgattgggagacagacatagaagttaattattctgagaacggttggaaactccttccctgaggaatttgtcaaacagcaaagaaccatctgtctaaggtagttttaataccaagctgcctgaaggcaggtgcatggattagatggcttgtgatgacgtggtgatgcctttcctaagactgaaaacggtcctggagaaagacctgccctgaggagtatagggtcaagaacctgacagtattgagcccttttttgaaattacagctagttggtgctgcctggtagcctgaattccagaatatcctgtgataacaatggttagttattacttcctcgaaaattatatgcatcagtcactcaaataggagtagttcaaatctttgctgatcctaaacagaattctccttgaacaggtagtttgcctgactcaggtctaagaggctttgaaacttgttgagtttgcttcttccccaccatgatagattgtatcctctcagaatgtaagaccaaaaaagacccactgcttcctttaagttggtccccattagtcatggtagcaaggaaggcagctcatgtaataggggcagcaaaccaaccctagaggctggaagcctcattgctcaattctactgaactttggaggaactctttactactatttagtcttaaatttgaccaaggtataacttaaagacttttattttattttgttatattgagataataattttctgcctgacccagaattcactacatagattaagctgacctcaagcatgcagacatccacctgcttctgcctcccgagtcctggcattgaatgtgtgcaccacaaggcccaacacgatcatctcattactttgctaaagcttttgaatgtgatgacaatgttaattttcacttctggctattgcagtttggggaccttattcaaaactgccttacccactcccgtgtgcccaagcgcttccccatgctttcttctggtagcttcaccattttaaatctttaatagtgcccagttgacttctgtaactggtgagataggagactagcttcattcctacaaatatggatattcaatttctcagcaaaatatattgaaaagtctgttccttttccaatgcttaattctcagcatccacaaggaagatgactctgtgaacatccttctagattttctagactattctcctggtttctgttttggtcacctgtatgcttcttttatttaatctcatttaacttgctgacattgtagtcagcaagttaaatattctctttcttctttctcctcaagattgtattgtaacttggattatttttgtggtcccatcaattattagggctactttattttcaatatgatgtactgatggggactgcatagaatctgtagtgtggacaaatggaaaatgtggttgtttaatgcataaacatgggatatgttttggtttcttagggaaaatctcctaaggaaggggaaatacattatagtgttattgagagatgagataaaggagaaatttgaataagaagattaaataaggggatggaaagaagggaaaaggagggaatgtgagcaggagaaactgaccctgaaggccacctgtagaggcgtacgaaacctactagtgaggacgcttcctgaaatatatacttatatgtatgcaatctatatctaagttttaaatgtgtgtgtgtgtgtgtgtgtgtgtgtgtgtgtgtgtgtgtgtgtggggtacaggtgttcacagaagtcaaagctgcatcagataccctgggatgaacttacagtagctgtgatgtctggtgtggatactgagaaccaaactttggtccccaggaagaacaacaaagcacttttaaccactgagccatctttctagcacccatgtttgatttttcttatgaagtcgtatttaatttattccttcacttgacaccagcatggcttactttttataaatcaagtatgaacatacctttcaactcttgctattggaaatattatctggtagaaatgtcaaattcctttcataaaaattgctgtcttgttattttaaatacctttcagaagtgatgactttcccctgtgcatattgatttgaattctttgtgataacggcattgattgagatcctcatgaagtacataaataaatgagcagtttgtgttggaagcctaactccaaagcttggggttgatattagacaactacatgattatctttagcacacactgaattaacttgattgcctgttaatttttctgttagtaatttggtgacagaagaagaggcatacaccttggggtaggaagaaaggcttcatgaacaacttaatgggaaaggcccaaaactgtagacaggtgtcctttattagctttctgtggctctgacaaagaccatgaccccaagcagcatggggaggaagggggttgtttaatcctacaattcaggcaacactccagcactgagggaagtcaaggcaggaactcaagcaggacaagaagctggaggcagaaaccaaaaccagactgctgcttgctggcttgatccctgtggcttgctcagcctgcgattttatacaactccagaccacctgtgcagggctggcatcacccacatcagtcaataatcaagaaaacaccccagggctgtttgtagaccagtgtgatagaggcattttctcaattgaagtttcctcctcccaaatggccctggcttatgtcaaattacagggaacaaaaattcacaatgaaaaccagcaacttacagaacagaaacattgtaatatttactagaaaaaaagggaaatatgaggagagaaaagagaggaggaaggatgggtctttttgttttttttcctgaagaaggcagcatttgaagcgcactttggatggcactgtagcttgagtggcgaaatgggattacaggatatcaagaatgttggactagttaagacattgaactagggaaaactggatagatgagaaataaatccagagtccttactccttttcagatcatatcttatgtttctataataaaggggggtttatttcaaacagtaaaccagtgctggatcctcaggagatgaaatcctgacgtctaatgagggggagatcagtttgctaaagctgagactgattattttgggttactttgaaaaggcacagtagatctactctacctgtgtatcagtgctgtggtctggtcttgccctggctccttcaggtgtaccaaactcatccttactttgtgtaaaaggatagaactggaatgcctatgtattaataagaatgttttactgatagcatttcactctagagccatctcaactcttttttggttttttcgagacagggtttctctgtatagccctggctgtcctggaactcacttcgtagaccacgctggcctcaaactcagaaatccgtctgcctctgcctctgcctctgcctctgcttctgcctctgcctctgcctcccaagtgctgggatctcaactcttaagcatgttatatttcatggctgaaactatactatgactataattcattgatattgttaatgccagtttatgggcataaaatgaattttaatgtcctttgcttttcaaatcttcagaaatcagcaatcgtattattagccatgtggctccaatgccaccatatatctccatttatactctatttcctgtgttaggtaggagaaaccaggctattggtgtgagggctcacatatacactaacagacatcatcagatcatcatgcctagtacacacactcactgctacttttgcaccaaggactatattgcctgatgggcttttcaatttgttcatagtaaccacagtgagtaaatgtggccttcaacagtgttctccatacaggttagggctataaggagtactatgtcttatgctctgttgcagttatgtttttcatttaaaaaatgatccaaataaaacactatatcagttgtaacaataacaaaaacatacatttagttgtatgtctattcttccacattaacccaatgtgaatatttctttcactatgtttattaatgaagaacagcatttcataaagagtgtttataatttacaaccacataacttaaagcatttcaggcataattaatgataaggatgaaacataagactgagcttgcatgatagggaccacttcaaatctttggttctgtagttggcatcagacagacttgcatactgtactcatgtgggctttgtagctttctgggatgaacaatgaaaaatgacctcatcataacaaaatgcttctcacttttagaaaatataagttacgaactgactggcattgttctaccacaagaaaaatagcatggtgtcactgaacacatgacatacttacatcacgaaacatggagatccaagtctcagctgaagcatgacctccctccctagtatgcatggcgctggaaggtaatttacatgcaaccagaagagcagtaatcagcaacatcacccaactccaaaccccgtaacctacaacagtgacctgcctggaagatatagtctgcaatagtggcacaagtgttataggagtaaccagtcactttctgattggatttgcagcctactccatgaaatggaacacatacctgaccctactaaagtggccaagaacatgaaactaaacattttatgggccagggctgggcgggggaaccctacaactatattttgctaaaggaatataacagtaaaatgacttctgattacacattgttatggtaaggaatcagtatgtcactcagtcttgattagaaaaccttcttgttaggggttggtctggtgctgtgcatacaaatgttaaattctgaaccccaaaatctagttgctgtccaaatgagtaattctcacttacacctgcctatgaaccttactccccagtttaattcctaattggtcagtaaatgtctggggcttatggctaagcagaaaagataggaaggcaggtcttagaatcaagtggggaggtctctagagagaccactagttggaaaacaagagaaagaagactgagagaagtagacaagatggaccaggagcatgtgaatagaaaagtatactctgaggacaaaagactgtaacagaaagagcctgggcaagactcaagcagcaagtaagaaggcatatgatttggatgcagctgagaatagctcagaacctgcccagtccaggcctacagcttgtaaataaattaccagggtcatatgtctcttatacagggttagctagagtaaataattcatgtgcaccatcttcttacaataaatggtaattaacatacaaactcaacagtgtgtacaaagtgagagaattttggatcactcagtcctaaacggaatgtgcttatcaacactcccccctccccaaattccaagaatgtatacagaagaggaggcagaaagattttaaaagccagaggtaatggatgactcttaggaagcagggtctccgagactaggcctggtatacatgaactcacagaaagacagcacacacaagacttgcagaagccatgcaaaatcaagcacagagaccagaaagtggccgcagagtcccatccctaaccaagaaactactggaaattgatatcagctgggagagtaaaaatcactccaatagagtgtcactggatctatcagccactattcaagacagaacccatgctcagcagtagatagccaacacaaaatcagctctgtttttctttgtgtgtatgtgctgttttggtttggcttagttttgtttgtgtgtaggacagggggagatggggaggatcttagaagagcaaaggaggggaggaatataatcaaaatatatgaaaaaacttaagccaataaatacaaaaaacaagtgtgggttgttttgtgtttgtttaatataaaactaaacactaactctggtctactgataaaatataaaatctgtttgctgatcctccgcttagtctgctttcatggccatacacaattatatttaggaaataaacagatatgagacaaaaacactagtcttataagagatacacagatgcctttctggaaagaagtattaaataattaattatgagacatgtaaacacacgcaaatactataaaagtttgcgcaccttgtgtgtgcgcctagtggctacagagaccagaagaggacatcagatcccctgtaaccaaagttacaatcagttgttagctgccatgtgtgtcctaggaatgaacataggtcctcttggaagagcaacaaatgctattaatcactgagacatctctccagccccaaaggtgtttttcattttgttatttttcatctgtttgaaacagggtttcactgtgtagcccttgctggtctagaattcactgtgaagatcaggttggcctcaagctcatggagatccaactggctttgcctcccaattactggaactaaagacatttgtcaccacaacctgccaagtttgaaacttttacacgtctgtgccagtctacagtctaccctgtgcctcagttatggtgccttacagtaaaccttgctttcaaaccgtttacatccttcagcaagttgaatatagtggtacgtgtctcagccactgtagaggctatggcaacaatgttacaaggtcagttccaccctgagcaacacagcatctccctgtcccactttctttttttgtgtagatagaggatgagagcaaaatatccacctctgttattgtcaaaattggttggactgttctgcatccttttgcattctagaagtggcttgtcaattcatattgataaagcccgcaggattactcataattcaaatgagaagcattgactccttaaaaggacttccaaaccatgaacatgatgtatctgttccttgatgtaagtgttctttcattttgctcggtgacttttttttaattttaaactatagaagtcttatgtatattttggatcaaaagctagaaataaaagccaaaattataaagtttttatgaaaaaaaacactcccaagaaagttcttatgaaattagggcagtcaaagatttaatgtaggatatacccaaataaatctattgaaagataaattcaatttcatcaacattctaaaagcgtgtaagtccaggacatggaaactcttgacaagagaactaaaatttacatccataccagccagggcttgaaacaagaccctgtcctcaaaaaacgaaaagcagaaaaatctaaaacttgttctcagaagaaaccattgaaatgtgaaacaccaagccatgcatccaaaatgatatgtgtccagtatacagagagcaggtttctaactcaatcaaaacaaaaaacaaaaggaggcaaaaggtttaaacagatgcttttctgggaaaaatcatcaactaaaaatatgcttggtatctgtggtccccaagaagagacttcctaaagtgtccccttacttgagttaggaacaaattcaaattgaagagattcgaggctctgccacgtcccaggcgcgaactgggatgtgaaatggctgagattctcctgaactgctgagaacaggatcgtacaatggatacttttaaaagatcttagcagtgtctttaaaaattaaacacacagtaaacataaccaagcttttctccaacatgttcgcctaaagcaaacaaaacccctgttttcacacagacttgaacatagaggttgatgtcaactttatttgtagtagtcaaaattggcagtggcccaagactccatctgtaggtgaaaggacaaattgcatcatcgtcacacagtaaaatggacacatagggaaataagctggtaaaatgtgaaagactgacttgctgagggtagggaggaatgccaagagaaagacatgggtgatagttctggcttggtcatggtgttaactatagcttttacatttattaaaaataatcaaaacatttacgtaaaatggccttggttattacatttacagaatatccaaaagtatagtatggcttagcaactaagaagacttgttcctctttgaaccaagacatggttcctaatacccacactagtattcacagcctcctaattccagttccaggggatccaataccctcttttggcttccgggacacctgcatgtacacagtacacacacatgcaagaaggcacacatgcagacacagaaataaaattttaaattttagtatatggaaataaacaccatgaagtacatttctatattttttttcccgttagactgaagcatgcttaagtgagggttagtgaaccatacatactgcagagtttcctcatttctgcacaccttttttgggcttctttagaaacaataagaacttaaaggctgtttatgcttttcccccttaatatttaaagtttgtgtgcacgtgcctgattgaaccttatttacctaagtaaaatatcctgatgaaactttcccagtgcggtctacttagattttaagaatctgacccattctttccctccctcccttccttccttccttccttccttccttccctccctccctccctcccttcgtttcttcttcttcttcttcttcttcttcttcttcttcttcctcttcctcttcctcttcctcctcctccttctctctgtctctgtctctcatttcactcttttgatcatcatggacagatttggggtgaaatgtagtgcttctagtgactctggcagggagcatcagttggttatgtcctgtaaaaggcatacggctaaagaagcttttgaatggaaatggagtccctgttcttcttttttctgtgtcagctttgatttgattaggtctgaaaaggggaaactattcagatacactaaacagaagagcattagcccaccccctagtccttgtgttactgttaaattttggtaggtaaaaggcacagtacaactcacccctgcctccctgagaaccagccactaaagcgcacagtaggagggctttgtcatgaaaattccaaagcttgaagagactcttgcctacagctttccttggggcagcatcctacctgtagcagttctgaccactctactgaacatctctcagtgcctgtaaatctttccttctgaaagagactgacagagatctagtcacaagatataagtgcatctattaggcaagtaaccagatccccatcttgcagtagcctcatgtgggtatgtaagaagctttgataaccaggtttctatttgaatctggtcaggccagtctttggtttagtatgtgtgtgcatgtgactcttctctccttaacatttgctaacgattggggtagtatttgcatactgctggggactggatgatgtaaaacttgcttcttctctccaatattgttcttcatggtgagtttttatgttttacttacaactactgaactactaccatgcacaacaaagctacacaggtcatgaatattcaaaagtgtagctacctacctacctacttacctctacctctacatacacacacacacacacacacacacacacacacacacacacacacacaccacatttaaaaccatgtactctcatgtaaaggcacataaacaaatgtacatgtgagggcccttattaaattaacctctacagtcccccacaaactatgtccacaatgggaatgtgaaagctgtcctccactctttcctctttgcccatttagtctgttcctttattctgtgtattttgaaacacttttggaatcatcccctcttccccaaccatgctgccaactgctggtaccatactttatagccaggcataatagacagcatggattttagcactgagtaacaaatgagcaagtgttggctctgcttgtatttgttgttgtgatcataaaaagataaagcggtgttaatatatgttnnnnnnnnnnnnnnnnnnnnnnnnnnnnnnnnnnnnnnnnnnnnnnnnnnnnnnnnnnnnnnnnnnnnnnnnnnnnnnnnnnnnnnnnnnnnnnnnnnnnnnnnnnnnnnnnnnnnnnnnnnnnnnnnnnnnnnnnnnnnnnnnnnnnnnnnnnnnnnnnnnnnnnnnnnccacacccctgagagaccagccacacccctgagagaccagccacaggactgtatagtgtagaaaagagtttattcagggcaactcaatagagagttaagagggtagtagaggcagagaaaaggagaaagtagagaagtagaggccaaccatgactacatggagagaggggggaagggaatggggagagagggggaacgggggcaggggaaagaggcaagggagaaaggcaagagtaagaggattggacaagcagcccctcttatagtgaaccagactacctcgctcttgccaggtaactgttggggtgtagtttagacagaataccaatatttgttgtgtgatagttgatgagatttaacttttcagagcttctctgtctttgcctgcagattaaagataaggcagtggcttatgagctcttttatcaccctctttgctcctctgtgcccttcctccacttttatctagaggtgttattataacatgcatataggcatgtatgtttaaggcctaagacatatatccactttgttacatggcagtgttttattggttggtcttctgtagaaaccctccttgccctgccttgggcccagggctgcagcctagttcctccctcctcacaggtcagtaggtccagactgccagtgttctcacttgctccatgactgtgtgtcttccatctttcccctaatacagaattccccacttggttttcaaagcctgagtccacactttcccttctaaatctgccctgattggatctatatgttatgtaacaactgtgtgcccatgagctctagagaaggcaaaggccaggtcccattcatctttctcttctcggtgagttccaatgcctgctctgtgcagtaatcacttgacacttgtttatgtggatattcacattctgtgttacctgttccagctacatgttaagattcgttgccatttgcccaagaactgttctattaaaacattttcaattttactagaaatttaatgagaattcctctattactctgtgaatttttaccaatccagtgttcaaagttgtatgtggaaagcagtgtctcagagggaagcaatatgaaacacatggaacatctttcaggagccacatgacaaaccacaagattcagataagaatgaaattccctctaaaagcaggcttagaggctgggcacaggatcctgataaggtagcagggagccaatggattcaggctttgaaagctagctgggaaattccatgtatgtgtaaaagggagaaagccttttaccaagccatgcatgaaggttactgctgtctctgctaggctgccacataagtaggtcaataaatagttcattcaagtataactttagtacctattctaaatggtttagaatcttttgaataagcatgaatttaaaaaaaaagaaccctctaatatattgttccaagatttttagctcagcaaatctcttctacaatcttttggagttggcaagttcctcagaagctatcctaaggatagtggtggtatagacaagacagacgaaggggctcatcactgcccttcatgccccctctccttattgctttagtggacagtaggaccacctagtcctcaggatccatcctcagagcactgctggaagacctctccatcttccttgatcaggtactgatttacaaaagcaagagtttggccagcccatgtctccgattcccactgccttgttcttgaagttgctcttcatgtttccctccagcaaatcccatggggaacctctgaagtgcctaagttactctttaataaatatctctcttctctgaggcaccatccctcctagttgaaccacctgccacaagctaaattattccttagtgtttacaccttgcggatatttatagccatcatcatggcaccccttagtcatcctccagccccggtgtgttacatatatagctcttttaatctttctacaaagtcagactcctcagtctcttaatcacttgtaccatcctctctctggtgcctataagagaacagtttgaatatatcccagatggcaaaaaataaccccaacatgtggtaactagggggagaaaaccacggaggagatgaaaggagcaatctccaggttaattagtggggtggccgcaaatatgtgcacagtttgtttcagaaataaagcaagctgtatttgttgtaactgtctccactttgaactcagtagtatgttggtggagccaagctgtgttgatggtccaaacagccactaaagacctttgactttgtactccctctgtgtatctcttgcttaagatggacttcaaataggatcacatagcgatacaagaaaatattactagtttctgtttagttttatggctttacgtggtttctgagcttcatataagctcagtaagggaggacctttgacttgtctctctcgttattaggcacatgggtattagtcatcttataaaattagcagtgtttactgaatatgatagcctaaataaggaacaacttcagtacaagagtgattgctcagaaatgctccacagacagcaggagaatatggccatttccaagtttgtttttttattagatattttcttcatttacatttcaaatgctatcccgagagtcccctataccctccccccacctgctccccaacccacccactcccactttcataatgttttgaaaggctatgcagaaatgtccactaagtgattttctccacacctgattcagccttgattcagtttatgtacttatcttacaaaatgtatcttgggttggaaaactaaactctgaaggagtccttaggaaaacctcccgattcctttgggggaggctgcaggatgtaccatctgtaagaagagtgtgcctcagctgtataagaaaggtagctggcaaggcataggagtgcatgcttttagtcacagcacacaaagtccagacagcttaaagcaaaaccagagaagaatgctgcttactggcttgccaggaaaggaacttgcaacagaaacaacatgtaggaacgctcttcactagcttgctcagttccttttcttatacacaccagacccacctgcccaaggatggcactgcccatggtgtgctgggtcctctagcatcagccattaatcaagaaaatgcctcatagatatgcacacaggcaaatctgatggagatgggtccctcaaccgagatttcctcttctcagaaatgcatgtctaagtttgtgttgagatgacagaaggtattgcaggaaggtacctgaggatgggcctgaagtcagcctcttcattaagttcctgtattgagtttttgccttggcttcctttgatgatacactgtaaactctaaggtgagataagacctctcctccccaaatgcctcttggtcatatggtgaccacagcaacagaacacacagcagagaggatgtgaccagcctccatctgtgactcctaggaaattttccttttcccagagtctcacgtggtccagaaagtgttccttctggcccagccatgcccctcctatagaattgtatgctttcttctgcagatgtctctaatgttctttcaggctgatcaactctgacagtttcttcgtgttttcttttaccaagcatttgtctgcagcttagaagatatgagtctcaccagagttcattagaatagattttaggctttaatatttgtaactgagcagttctgccagtctgaaggtagccaaggacaaccatttcctctcacacacaaagtaaggttgtgaagggactttttctctgaatgaaggaggggaagaggaaagtagaagccttctcatgttttattcaaatgttaacaaagaaatcgagaagtgtgtttccttaaaattgacaccatttttatcccaaatgttccggtgagtgatagtgggtatggcaggcagtcacagcagggggagctttctccaggagctcagtccccgtgggaagcattacctccaagtaatacactaatcgctttgaatcctgcatattttcacatactgtgtgcatacatacggatattaataactgttccctagacgtcacttcagcacttggagagctcagtgttgctaagcaagtgctggagatggaatcagatgcagatggcagttcagcagagaggattttacagagacgcatgaggagaaaggacggaggtgctgactccatccccatggatctttgagttctgaggtgatcagcttgtgtgagctatgcctgatattcatccacccactgcactgagattataaatggcattgctagtgcttaaaggtacttacctcagaatccatctactcacatcctacctgcatcttattcagtggtttctgtctagtaatttcttacagcattgagacatacataaattttactgttttgtgtatatgttctatttccatatatatcttagaagaattcatattttatactatatatatatatagatgtatatgtctatgtgtatatcatatagaaattcagaggggaggagaccctttttcatactaccttctgatatctcagactaaggatgatattcctatattatataaggctccattaagggaagtagcttgcctaaggtcacaggtcatatgtttctagatcaaaattactcctcctactttatattcatttaagagaaaatgcaaaatgggaaccctcccatggagtgagtattctatttaacaacattgtttaaaacagtgcgtccacactggatgtgaccacacagggcctggaacctatgttcttcactcaggtttgcctctcgcttggacggcaaagagtttaacttgttcttgtaaactaagcagctaagcaatgtaccaggctttttttttttttaacaaagaaatgttttcatcatagattgaaattgcatatgctcaggaaatttcacctgctagtacagagatactagtatatgatgtcacacgtttgggagattgtatgcacagcctgaaaagtatcacttttgagtccccaagggcctcaatttagagcctggctctgctgttggcttcctatgggatcttactcaagtcacaacctgtctcttgacctttgttttatattatgaatactaaagttgaatgaaataatcaatgctcttcactttctgaatcccctcaatagcgcattctgggcatttgggctctaaatagacaaaagaactaattggcttcctgtgaagatagtgccaattgcaactgtcacctgccactggtcccagccatgtatgtaagggtcattagatgactcatagctcactgtctcacaactcaaagttcagttttgttacatatttctcaactcattcacaaggttatttctgtaccagctcattggataacagggaaggttatctaatttaaagttcactgtgaaacagaaattcaaaagattatacatgcatttccgtctctttagatatttctgtctttcccccttagagcaggtactgtaagacagaactcttttagtggccatacattgttatagtctgccttatgctgctatggcataataactgagactatgtaatttgtagaggacagagatttctttattggtctaaaggatgggattcacaatatcaagatcctggcggggctctgctgactcctgaaggcccctgtgtgcttcaaggatggtaacttgttagtatgctgttacacagtgggtgctgcatgaggcctctttatagaggcctgtttaaatcctggagggagatgcccttgtgattttacaatctcttcaaggctctacctttaatgtgatcacattggctacatctgaggttcagattgaacacaatcaatacataaaacataaaagtctaagattaaaagagggtaatatggaaaacagctttgaaggacattaatccataagctggattaaataagagtgtgggggggcagggggagagaaggggagagagagagagagagagagagagagagagagagagagagagagagagagagagagagagagagactggagagcgtgtaagtgcttgtttccttttgtgaaacagagggtaaaaaggacatttgaggaaacctagttccctgtaactgagtcctggttttccatttgtaaagaattgttcctgttcttcttgttcatgtcaatatgtttattaaagaccacatacatgggttctacctcatttgcagaatattcttttgccttggttgattgctagaaatgagttcaaatagtcttctatcccacattgaacatatagctcattccataagtcactgaaatttcaggcatttcagcttttttattgttgaactgagggtggctcttggtattttgccatacaagattattgaaggttctgatgtatcagtgtgtaagaaagtttgtgaagatgcaagacactgtattaatgtaaggatcacttgctgatgtcctgggtagataatgttgttatggtgccaatatacaataccttcagagacatgttcctacaggtcacctcagggctaggcttgccctgaaacaaccagaataaactagagtattttctaccacaaatctaaaagtaagtgagctggcttaacctttgagtggaggtaaaggtaagagagattttcatgatagaaatcatggaataaattcaaccatatctcaaaagtagatattctggtagtggttgctgctatacttaacatcaatttttctgttaacagatcaaccatgaaatgaaagccaatatggatggcttcagagttaaaagcgggactaaacaatactatgtagaaattaacttgagaagagacttgcattggccaaaaggcagggtaatatttttagtaagtgtattctatgtttcatgaacattctatcaggccagatgtctttaggaatttatatttccaaagttagtaggtggaaagactctaaagccaactacctaggcaggcatgaaagttccagtactgatctctcagacgaagaatgcacagtgcgcccctgccaccttttcttaaatatactgatggagctatatatatctgacggaagattagaatcaggaacacacagccaactcaaaaaaagctaagtaataagaaatcaaatgacacaataaataggaaatgaacagacagtttaaaaacataaatacccaatacatgtggaaaaatgttcaccctcactagttatcatagaaattcaaattaaagctcccttggtattccattttatccctgtcagaatggcagtcattgagaaaacaaatagcactgcccctagaagcattgtgggtgtggctgctgtgtcatatgtgcatcactaggtggcagagagtgtagagaggctatgcctgtgctcagttctctgatctataaacatctgaatgattagcagcctaatatttcctgaaagaaataggcctggaatgaccaccagtctggaggcttgcaggccccagcagttcccaggtttgagagcaagccagagactggaagaaccatgcctgagactgaaggccccagtgagtttccagtattgatagagtagcagaagcccgaagccttgtatcagaccaacaagtcattgcaatgaacatttgcaagcagaaaagtgtagacgaaaaggtctgctttgggacccactacagctttcacaataagattgtctgatctctgctggcaaggaggtttcaagggtggacggcaggtatgatgggactaggtgtatgatgtgaaatttacaaaaagaaaaaacaataaaaacgttttttaaaaggacaaaaaaaaagaaaacaaataacaatgaatgctggagaagatgtgaacacaaatgagaccttatgcaatgcaaataagaatgtaaccgagttcagccattctgaaagtgtgtaccagagtttctcagactaaaaatatgtctgccatatgaccaagctctttcactcgtgggcacttagctcaaatactgtatacatcacagagatacttgcatattgatggtagtactatttgcagtttaccccaaagactgcaaggcagcatatcacatggtacttacatattggtggttatgggagcagtattcacagtaatgaatttaagtatccagcctaggcgtccatcattgaaggaggaatgaagttggggctggaaagatggcttgaggattcagagcactgcctgatcttccaaagaacccaagtttgatttccaacatccacgtggtgcttcatacaactgcctgtaacaaccctcttccggtctcctcaggcaccaggcacgcattgtgcacagacatacgtgtatacaaaacacctgtgcacataaaaataaactaagaataaataaaatgtgaacaatgaccatatcaggaaacatgctcatgtggaagagtgaagagtctcacttgttacagggtcccataatgacttctgagagtgagagaacggtcctctcccaagattgccccgattggttatccagcacaaagcagtcagccctggatccacatacatctgaacaaaatggatagaaggtggtgttgtgtgtgtgtgtgtgtgtgtgtgtgtgtgtgtgtgtgtgtaacaataatagagaaaaggaggatatcaatttgagtggtaggcatgagggagaactggagacaggaaagggatacaggaagtgggataattatattttaattaaaacataaaaattatttaacaattatttttaagttaaaaagaaaacaggctgagcaagctatggggagtaagccgctaagctgcattcctccatggcctgagtttcagcttaaaagcaaaaacagaagaataatggaaggaatgtcttgtcaggaccaccagcccagggatggcacactacccatagtgggcggtaacctcctacatcaatcattaaggaaatgttccatggactcacctatagcgtgatcttatgagggaattttctcagtcgaggtttcctcctctcagatgactataccatgtgtcaagttggcatacaactagccagcaaaaaagcaaaggactaacaagagaggaaaaggaccacaaagggaaggatagcagagtttgaggtactgactatgtccttatagacttgcttgaatatgtcttttgcatacagttattactaggaagatgttttaaaataacttttgtgagcaaatacaaacagcaagcaggcttgaaaatacctctggaagctcatatcctgtacttgcttagcctattggttttcctagactgcctgtctctccttacatctcgcctatcatgcatttggaattcagtctggctattcaggcttagctcaactattaagacatccataaggcatttaaatttatagtactagcatgacaaccacaggtttcagtacattgaggaagcccttgtagtgtcccaagataaaggagacctgatttatatacttggtttcaccaacattaaggacattgttacatgtggaaaagagaagataggtacacaggatcccaggctggccacagacagtagtaacatatgaaatcttttggtatgtgtatcagctttccggacctctgctcctggaatatttgatttgctaagcatccattgcttagaagctctgcatgccggccctgtgccagagctccttgcttcctgctgcctagtcaactgtgcttccttcatgccctggtgcctagaggcctgccgacattcctctggcctttcctgtttaaggcactgaggattttgtctaagtgacaggctgtggtatgcttttactaatgtgttgtctgagtccctctcaaagcaaagataccctctgcctgagttgcttgctctgcattctgaatgctctcctgaggaatagtttatatattcttgttaatgtaaagggggaacatttgggcgccttgttttctgttgctggtttgtagacctatttttaacttttgttctttgctgttttttccccctatgattgtgaattggaaggtgtcagactggctgcccttgaggctggtgtccctaatttatcccaagaataggaagaatttaaaggaggtaacaaaactggtcaggcccaggtccgggtccagcacattagcccaacctactctggaagaatattctccagacgtaaagagagacttgtttctgagaatgtaggccatctgcttctgtggcgagcacacagatgctcgttgaggccagtggtttgcatccagtaagccacagatgttcatcctttctttggcggtgggggtggggcagaaagcagcatttttctgcctcccccctctacctgtcaaaattgcattctcaattgcctttcctgggaaaactcttgcagaggtgttttagatgtgacttcccttgcatatttcggtagcacttttctctgcagtgtgccacacatggtgccttagactgttgaacccgggaaattcctcagtcatggtaagaagcgctagtggtgactagtccacttcttcttgtcacacaaaagcacactgaagtactggacaacgagctgacgtgaaggagattgaaaacgaaatatttttctttctggagcaggctttcactgtaggctggtgatcaaagatgtcccatacctgggatagctgtctaactctccagatgccnnnnnnnnnnnnnnnnnnnncttaaacaaaacaaaaggggaaagttaatatagaagaataagtgtgttgacttatattgaatttataatataaaaatctacttctcattcgaatccagtggacttgtaataatgttcacatgctttaatctattttccgcaaccctcagtgtgttttctacagtgaaatgccatttgttggcataaaattctcagaggtatggcatcatttttcaaacagagtatgcttcatttgatagtaagccagtaaagtttggagatgtggttttgttttcagcctaattacgaaaagagtgacaaatgaaaaaattaattttcttattctaaccaaaaaagtatatgaatttaaagcatttctaactatatgtctaatgataaaacaactataaactatattacaaatatcacaattgtattaaacatcaagaagatagcctgaaatttcacattaatatagttgtagcagacacagtccattttttaagacttaaacttctttttctcagtgtttcaaattagtttgtttgttttttaagatatgctccaatcctgcaaaagaatacaaaggaatatttacaggaccacatgcaatctgagagaaatatatttacctcttctcactcattgaaacatttacccctcccagttttgagtgtgaagtggctgtcagtccaatgtgacggggtgctgaaagccttcttcaatgagaagtcattccataatgccccatataccagatctgcactgatgaacaggcagtgcagctgtggggctggaatagatactttatccaaggatgtttaggcatgaagttagttagatattttctgcaacttactttcctcttctttagagtaagaataatggtagtatgcccatgtaagggtaccatgaattagaaaggagttaatacaagagcctcaaaaaatgttggcaattcatgaagctaggtctatgacctgcaaaaggctgcaggtccttgttgatattcctagttgcctatggttatctagtaggatcttgtttctgcctagtagacatgaactataaggagtcaaggtgactatggcccttacgatcccagggtattgggttacagaagctgccactcagagtaatacacaccctgtcccattatttactttctttccttctggtcctgtagtttgaacacatgatcctagtatatattaagcaaatgctctatcactgagctatacctaatcctaaaattttatgctagattatagtctgttactgtttaaatgttaatatgttctttaaaatctaatctgatacacacacacacacacacacacacacacacacacactgtagctttatagaacagacagtgagaagcaggttcttaaggaactcccaaccatacagtatatggtgccattaagtgatgtagatatgttcaaactaagtgcagactcagaggcagtgctgactggactctagtctcttatatgatgtcaagtgtgtggaatgagacttggcttcaagatcaccagaaatcagaactagaaccatggggaacggtcagggtggagttgcagtagtggctccatggagaacaaaatggtctagcagcctcagtgctctggaaacagctgaccttcccatcagtgagggccagctacagaagagtctgaatttagatatgaagtctgaatgtagacaagatacacacacactaactgatgtactgactcttccagggacggaggctttcctgaattgttctgttcagtagattgtgcttttcaaccccagtatcctgaatcctgctcctacctgtatatgattagagacagtgcccaggccccttcatcaagcatatgagtttccctccattgccttctcaggagccttagctgtctgctcagttgactctgggagattcccgctatgtgcaggggagatcttggtgggcttgctacttaattcagcaaaggcagtaatgctatgtctcttgctactgcaggataaatcagctgtctccctcatcttgacttcattggacaggtctaagaattcctctgtaacaagcaaccccttatcttctaggccgttgtgcccgctgtggggaaaatgttgttggagaaggaacaggatgtactgccatggatcaggtcttccacgtggattgcttcacctgcattgtctgtgatgtcaagctccgagggcagcctttctatgccgtggagaagaaggcatactgcgagccctgctacattgtaagttgccacattaggtcttcatctgctctgtcttatttgaccaaatacaagtcactccatataaatgtcaccatcagttctttgacgttcaaaagatgtgtacacatgtaaattgacatactgtatttttttctatataattacagttcacatgaggtcaaaaattgtgttaggagggggctgcctttcaaccaaaggtcagccagaaagctgtcttgcctgtgttttttatccatgtatataggaacagtatgttctctgtcatgtatatgaaggattcctgttctcagagtcatacagtcttatcatgcatttgaaatctcagtattttaggaaagacttagcaggtggcagaatttgtcaatggccttctaaacttctggactaattatctctgcagaatcattttacctccctaatcccccaggttgtctatggtgtagagaaactctttattataaagtattaaagagaattgcattctaattctgactgagctagaaatggttttctgttttaaagaacaaagctatttttgaatagcaaaacttagtgactaaaaataaataacatttccttagcattttatatggctatttaatctatttagctaccttctgatagagtagattacttaataagaaaactttatacccaaagtaaattcctttactgtcattctggttttgatctatctgttgaacatatccatggaaaagtagtactttttacaaacctaaaaattagtcacagttgcaccctctgtcaaggcatttcaacagcaaagaaaccttgagaataagggactcagaaatttgtagatctccagagtttaattttattggaatttctgccttggttgatgtcttagtattactgctactgtgatgaaaaaccatgatcaaaggcagcttttttaggaaacagttcatacttccaggtagcagtccatcactgatgaaaatgagggaaaggccatagaaggatgctgcttggtggcttgctctccatggctccctcagcctgatttactatagaacataggaccaccagcccaaggatgagctgagctcttccccattgaccactaatgaagaaaatgccttacagacttgcctacagccagatctatgatggcgctttcttcattgacgttccctcctttccagtgactccagcttgtctcaagttaacataaaattaagccagcacagttggtaacaaaattctgaaaactcaagttcattgaaacccaaggatgtgtggcacaaagaacagttctccacgactgacatttctacgtttcatctcttggtttccatcttactttgttttccttccaggaacaacttaaacacatgtggcagcattataatcccatcagctaaagcaggtgggagagaaaggaactgttttcaggtcactcgcctaactgctctctttagaagtgagactagagacacaggcgtagggtggcttctggttaccatcagtcagagtcacatttcttccttgtcctgcgacttgggcagtgctgcatgtcactagctgttcagactgtaacgataagcatagcagtgccctgtctatctggaagcagcagcatctacaataagaaaaagtctagtcagcaaaacctcacctcttacatcattctactcttcaagtaccaccctgtgaaatcattgttgaaaagaggaaggccttttataattctgacctcttttaagtgggctgcactttctagcgactcaggacagccttgtgcaatcgtttattgctgcaagttttggcagccaagtcagcaaagcctcgtccagccatctagctctcgtctagcagggagcagtaacctttttatagctcctgtttggtccctttttactgtgccactgatcattgctactgtaacaatgcttctgtggaaggcatcttaagctgtttatttttatgctttgtaagcaaaggtcttacataaaatactgggaaactgtagcagcatgcaaagaacgtgagtttgaatagaattcagtcaaagctttctgtcgtgggcaagttacttgctctttccaagccctggtttttctttctcatctatatactggacataatgggatatttttccatcagctccctgaggatgaaatgaggcaacccttgtaagcacccttagtctactgaggaaaagctattctacaaatgttgcatctgtacttagtagttaggtttggggacctgttcaccattccgtatgtgtgcagtgagactcagactcacttagctcaaggaagctggtttgcttcttggatatacctatcttccatttttttgttaatgtttgcttacctcggtgcacaacaaagcttcagtttcatgtttttagtcattttctatagtgtggcagattctattatccagactctattatatgatccttgagattgcttaagtcgctggctccctctgttcaggttgtgtgtcatagcactctgcacttcaagcaacgcagagtatgtgggaaatatttaatcatacacatggaagagctgagtgaattcaaataatagagaaccttactatcctttctgtgttttctccccctcataagaccctgtcattgaggtccttgacttaatggcctcctttcatagctacccagaaaggttgaaatcttctcagacttcagttccattttacctaaaggccctctctgttcagaatcgattccaggatgcagcctggacctcgtgcccttgaccgaggtatcggcacttccaactccttctaaactttcacagttctgataagctgcatcagaacttcagagggaaacagagagtgtgaattagaacaagctgcatggcaggtggacttagtacaggcggtgctaggattgcttgtctctccaggagctaaagttctagagcagaagaccctgctcgtgggatccagcttcgtatcacacggctcgacacaggtgtcccaaagacattgtgaataagacaagacaagcaagtccctgggtgccagtccatgggactcttttctttctgttcttgtgtttggtttgttgttacttaattgatggaataagatataataagaatagcaaaggcaatggcttagttaattatttctctgtaagcaccaaccactcatgcttgactattgatccaggagtaaggcctcccacctgtaaaacaaaacttaaatttccttctgaattggttattgataagcctaaaatcatatctaaatgtaatattgtataccctgacattcagtgcccagtaatctcatcatatttggttaatcacattagttctttcctatggtctcttgagctcttattctttgtgtatctgcatctacagttaaacagatttgattcagtgtggtggtatagctctcttcacatgtattttacctgttttctgtcaagtacctgatatgaatatatgcacaccatacttcagtggcaatcttcacttttagcctctcatctacttagatttatagtatgtttatgaactaccttttaaagcaaaagtatattttccattcctttatcattatattatgcttaaagaaaattgagtgaaaattttatatctttatttaaaataaagtacaataaaataaaaataaaataaaaaataaataaaatacttttaaaataaaagtaaaataaactaaatttacaattaaattaaaatttaaaagtaacataatttttaaaatgtagtttattgttttgcttagggtttccattgctataaaatgacaccatgaccaagcccactcttataaaggacatttaattggggctggcttacactttcagaggtgcagtccattatcatcatggtgggaagcatggtggcatccaggcaggcatgacactggggaaggagctgagaattctacatcttgttctgaaggcaaacatgaggggactgtctcacacatggctaggaggggggtttcaaagcccaccccacactgatacacttcctccaacaaggccacacctcctgaatagtgccactccttgggccaagcatattcaaaccatcacaattatcaactcaaattatcaacatcagtaattctaggacattgcctgctgttcttagttttgacctagaacacgtgatcctcctgccccagtttcatagaatataccaccacacctaacactttaaaatatttctttagaaaactgtttctggttgacaagcctgttgcaatcagtgagttcatatattaaacgatatgttattccctgttagatttatttagattcatctgggtcaatgtaataagtatattatgtcctagttattttaactgatgcttatatcagtagtagtaaatgatcttgtaaatgactcgtttcgattatgcttatagttttgaataaataaaaagattaaaattaagagcacttaagtttattaggaagtaaaatgatttaaatagaatctatctaccttggtcctatctgtctggttataatgttgggtacatcatttgcctccaagtaccagggtgtttttgtttataaagttaaaattccctaatgtcatagataaggaatgagcaagtgtgttatttttgtatcatgaaactattggattaatctgctgagtgaccttattgtgatacgatggagaagctgtagcccacaatgggcatgtttcagctgctgttgctatagaaatattgaaagtaattggcttgataggaggaacacagggtacatgggagatgagtgctttgcttacagtcatttgtggttttaggtatgaagggcatcaacaaggccttcagcttgtttgaaacttctctggttgaggcaagcttccttctgagtgttaatgtaacaaaggagcacttgctttcttcttggcagtgtaaaggagcctaggccttgggacatacacatcagacgtcctcaggcagagtctgtttatgaaacggtgatccaggatcctccactgggtcagggcttttggacagagtagctggaaaagagaggcaggcatttttattagaattgatatcctactgactagcagacctctgaaagtagcaagccagtctcctgggagactaacttgaaagtaccagaacctggcacattaataaccagcacattagcagccttttgctctcttatggcactaaatggtgaagttaaagcagtctagattttcaactccattaagatgtagttttcttgtacctctgcaggaaagctgtccttttatgtactaacgtttgtcctaatggaatgttttaaaagcagggccctgcgtgggtgttggaaaaggaaccaaagagttgggacagagtctgaaaaatccacatgagcattgctctccctaatcgcccacctctgctctcatcagcatgatgctgcttctgcctccctcggtctcctactgcacacaccacctacacacttaaacacatccattcctgctgtcttactgtcaccccaccagcactctcccaataaggaaaagggttcgagaatgagaaacattgttttaaaaaacactctccaatgaggttgagtgtatgaacctgggtgtaatcaccctcattcctgaccttccatatggcacaccatgtctgttggagctgtgataggcaaggggagagtattaggcctggttacaaatgaggctttgatatggtcaaaggaaaaggcaaaatgaaaaccagaaagctttcttctgacctggtgtccttatttgttattttatttatttatcttatttattttattcgctttatttatttaccatgctgttaccctgaaaacttacattcatccttttgaaaacaccagaatgctgccagtaactggccactcactttaaagtcacagaagctttctggtcccaagatttcatttgatagcaaccactgactgaattgtgccttctagcattatagacaacgggtaaaaagccatgacacctggtcttcccttcagtatctacaaatcatggagtctcaaaacaaaaagaatgcatttatgtttagagttaagtgtagtcatagtgataaatgccatctgcccaatagtataagtgtattttttagtggttttctttgtctgttggtctgaaaggagccgtggagatattggttctgctccttttactgtcatttccagtagcaagaaactgagacttgtacaactctggtgtgatgagctttgtttttatcttatattttattttgttgttcttttttttaatgaaggaaggaaggaaaacctaaatgactggtttttctctattgccttctctaggtggggtctgggatttttgtggatttgtttgttcattttttagatttaattcaagctggatttagggatatataaccttgtcttattttagagaaatgttgggatcaaaattgtctttttaatggtagcgattcttttaaaaattaatatcttttaatatacagtcattagaagactagaaaaagaaacatatccaattctcccatgccgtatctgcagtgtgctgaatgtgcatcttctgcctctgtgattgtttgcgtggtcataaccatggggctgtaatagcctctgatgttggtgacacatgccgagtactctcaccttacttcctaattagctacttgcttagttgtctaatagtgtgtcaaactttgttttgtacagaaatattccatggacattcataaataatatataccctttctgaagagtgactccaaaagaactattttgttagataaacacattaatgagaacattccaaggtcagatgaaactgtggtaaacaaagagccagtaaaactactagctgatgagaaaaaaaaaatgggatataggatcgtgctcagtggtaatccacttgcctaccatttgtaaggcaggaaacaaacaaggaaacatgaaaaggagggaaacaaaaaaatagaaaaataagcaaagataaattagcaaattctgatagttatattcaagttatagtatttcaagagaatattttacaaagtcaaatatcaatatcctataatatgaaaagcaaaatacaatttatgacaaaactaccagattaaccagcggacatgatgttattcgcaagcctcccgtattgcaggaaggatcagacttcttccccttctgtaagtatcgctacacagagaaaccctgtcttgaaaaacccaaaaataaaacaaaacaaagtctcactgcactgaaatatatagcaagcaatcctgatgaatgatgtggcaaaatgaagacacctgttctttagaaagcacatttctttctgtctttgaccaattaattacaggagttggataatacaattaataagattgattgagtcaagatacattgagtgtggggctggtgagatggctcagcagttaagagcaccgactgctcttcgtaaggtcctgaattcaaatcccagcaaccacatggtggctcacaaccatccacaacaaaaatctgatgccctcttctggagtgtctgaagacagctacagtgtacacacatataataattaatttaaaaattttttttaaaagatacattgactgtataataaagaaatttattttcccgatatccataaaatatttagaaaaacatttatcaaatcaaaatctaaaaggaaaatacatatggtacaccagtttagtcctacatcttgggaggctgaagtaggtatgttgcaagttcatggccactcttgattacatagggaaaccctgtccaaaaggaaaaagcaaacaaattctgaaagggaactgtagctgaatccagcagttgactagccaagataacagccgagaaatgaaaagttaagtaaacaaacaccctgcttgtgcagactgcttcaactacggaaggaagatgataatgcctgccagacagaggacgtggatggaggtctaagtcacagaagccactgtaaggagagtacagaaaataccttgatgctcataggagatgctgcctaaagaaggggtgggatgcaggccattcatgacaagttgttggtaactgaaaaaaaattctaggatattctataacagtgaattcaaggccagctgaggttagaaaagaccctgtctcatggggaagggtcggaggtgggtgggaattaatgaatgcggtacaaataaatctagacaaatgttacaaactgtgggggtgaaaaaagtgtgggcataactatagaccatttcctttctctccactgaacctaggctcctttgctctgagtaaaatgctttaatcctagtacactttttctcaatgtagccttgctaacatgcacaaaaccttaatttcaaaacccatgcttcataaaccaggtatgctagcacatacctgtaactacagccagggaggtgaagacagggtgattaggagttcaatgccagccaggggtgcagtagaccttccctcaaaaaaaaaaaaaaatcacatgtttcataggaaagatgctttttctgtaaatctaaaatatgcaaggggggggggggaccctcaacctcaccaatgtagatgaaagtcagaagtgctacctgagaaaaggcgaggaaatgtcactaacagggtttctcctatcttcaaagaacaaatgatgcctgcagtgtctccaccctcagccttctgagaccctaacttagcctgcctcagggagggagtgctaatctaactgcacatgtggagaaagcctaaaagaaatgttgagttcagtgctgcgtgataaattggagtggtaaagtgaatgccacatagtaaaatattctcaattatttgatgagtgcaatatttgaacaatattagcagcctttaaaatacttggtttaaactcatatagcacattggggcagggagagaatatgagtgtaattctctccatggatacgtttcactgaaatgatacttcataaatttgttacaaattttttaggatttaattattctaaagagtgtgtgcgtgcttgcatgcatgcatacatgtgtgtgtgtgtgtgtgcatgtgtgtgtacgtgtgcatgtgcgtgatgggtgtaccatgctggtagatgtcagaaaagggcatcaaatcccctagaactggacttacaggtgtttgtgagcctatgttttaggaaccaaacccaagttctctgcaagagcagcaaatactcctaacagctgagccacgtctccagcctatcatgcctttttttaaaaacaagcaaccaccccagcacaaagccagctctaaataaaatgaggaaactagtttagttgaataaggccagccttcctacccttgaatctaggaatgtgcacgatcatctcttatatttgtatttttctaaacatgctttttaacttttgaagtaggactatgaaaacaaaaagaaaagaaaaggctaaatgcatatatgtttgcacaattatgtaggttttatttttttgacacagacataacaaataatataaaggtccacatacttgttacccggtttaacaaaaaactattagaaatgcactggattctttgttctcatcacagtccccaaacttccttctgtcatacccatggggttctaatgcacatctttgcagtgtgcactgttgtttacatgcagggtttcatagctgtaaatatagaacatataaacatttatagacaatggtagactataaaacatgattaaatctaaagtggtaggacaaagcctaaaaagctgacaagataaaagttacaaggttagatttaaagaatacatgagagatagcccttccataaaagccgtaagaaaaactgagcaactaggcaacactggaaattgtgtctgtgtaacggaatttagggtgctttggagcccgcctgacacttgtatgccactcttagagccactcattcataatcagcagtatgtccaatctatggctaccttttctaatgatatagctctgtcctcctgtggacactgggcagtactttactgacagagaagctgaagcacatacctcctagttgactgaccagagcaacaggaagtccttattgataacatttataacatttccccctaactcttatcccaaagtataccaatttctattgtatttgaataagaacatttaaggcccagaaggaactaaaattaaagaagtactttaattcagtgctgttgttttatggctggaaaagctaacagccagagaaagtttgttgatttgcctgaattcacatgtttggcaatggtagaagcatgaatagaaaccaagagccttggtggtaccttcagagaccctccctctttaggagagttttgaaataactaagcctatgtgtctacagagacagagtgatccctggggaaagctggactctgcccacttcagtaggaccgtgaaccaggacagcatttgcttcagctctgaccagaatgaagggtctcgtatttccaggttcagtgcctctgaaatgttatgctagaaccttcttcctgccccagtttgtttatttttaaatgaagcatgaactcaccagccagtgtttgacagagtttggatgaatgtcagcatcaggccactgcaataatggtttaagatttatatttaaatataatcccattacttatacacttcattaggctgagtgaattgctggctgtggttcagcaaagttcctactttaaagataaaggatggaaagagaataggaaaggagcctctttattccttgttttctttcttattcatcttgcagctcttaatggacagaaggacaatagttagccatctacagcgtaacgtctgcactgccgaagccctctgaactgctctgcaccaccagaacaaattgtccatagctttaaatttcctataagtagaaaaagaaaggagtggacttggaggggggaggggggactaagctataaaattctaccttgaaactctgtctgaaatgagctcctgggtcctcagtaatataacctttcacttggggttggaaaatacaaaaggaaatgagtgtaaagatggagaaaatcaaattacaaccagccaccattcagcatctactctgtttctttagcttccgtttctgaacatatagaatgacagtttctccttacctctcgtgatcacacagtgaaaaaacattccgagaggggggctgagctagagtcagtaaggtgtgcgtttgattgtttgtatgtgtatgtgtgtgcttgaattttctttttaactgggtaattgcactaggccagagtccaaggcccatgagcaaagccttcaaaagaggtcttccttgacttgtgtctctagctcacattgccttccagcctctggcacactcctggaccccgatggtctcagagctcagggaatatgaggccttgaggtcctcaaagcttgatttttacagcatgagtcaaaggtcatctgctttcaatcactggctgtgttcattaaacaaatacgttctagaccctcccaagtccctgtacaggaggacaagagcatagcacattctgtaagccgagggtcaaggaaggcctgtagtttgtatgtatacaaagatctgagatccatgccctagtctttgacctcacatgaaaaatgactccaggtttcttctccttccctctcttccacgagacttgtttccagtagcctcctgtgaacattgacctcagaagcttctctctctgccctggtctaggctgctggctcccttgtgtctcttcccatctctctccctcaaacatctgaattaagcagccttcagaaactttcttggacaagacttttagcattttgttgtttttcctgaggttttgcttttattttttttgagagaaaaaaaaatgctaacatgaagttagctgggtagttagctaggaaggggctgggaggaattatgagaggggatcagaatagctgaaaacagattttaaaaattaggtaaaattaaaaaataactatgggaagtttttcaactatatgtgggttttcttgaacgttcaatgtcctttttaccaacaactgcatagggctgaaccttactataagtgatataaaatttgtggcttcttggcatattccttaatgatgtaaatcctaatagaatatataaaggcagagaggtcacatgtgactcacccctgttgggttttatggttttttttttcaatgtttatcacagcaggtgatcctatcattgctttgagagatgaaggttggaaggggacaagcttcatgccaatgtctcctcacagggtttggcttatatcctgtttgtttgccctctgtgcacttgaacttgagactctctgaaatggaagggaacaggaaaacttggcaacaggagcctatgtgcagtcattgctggatataaacatgaacaattgagagagaaggcgtgagagtgaagcaggctgtctagtttccagcccaaaaactatcacatgagctgtggtgttcaaggtcaagtgcacagattttccccacacagcaaaattaccaggagtttgatcagaagttctcttatgtgctgaatgtgacaggccacttccctcccataacccggttcacaaaaccaataaaaaaagttcatagctagttaacttccaggacccctttagcacacttccctgcagaggaaggcgtgtcagccccaaatgatgccatcattcctgtagagcaggttcctttttccttatcttacagagatgtaatatatggggatgtaatatatggggatgtaatatatggggagtaacagtgcctaacacgggaaaatctgcctgaaacgtctccattgcatgactgaaccaactactctaaagcaatctggatgtattgaatgcatatattttgtgatattttgcattggaccaagtatttttatataaatagtaaacaccttccttaacagttattacatgttctgagtcccttaatgctctcaggggtggctgaagtaattcagaagaatacagttgatggtatgggtcagttgaaatgaaattgaatcttctaagatatattcctcttgaaagtaaatatttatattcttccaatttagccaaatgacctaaaaagttttctgttgtaaagcataacatatgcaagtagttctccagcaaatagagaatagttgagtatatttaggctcaaagggaagaaggaaggaaattccggtatcttgggagggaagtaagtattttcatggtcaaagctgcctgcaggatgggtcagatggctgctgttattccctctgtttttaccttctttttattaataagaacagaattaagacatgaagtaaaaccattttggaaagcaattagaccagatatcccagaatctatatcttagccccacccttgtctttaaataaccatcccctgccatcagatgtgaccttttcttctctttgtcagcaaggctctcatgtcagcctcgaagtctatttctgttacctacctctgcttcaagggccttcctgattggcctgtagttgagggtgtgcaatctttctgtgcctccagagtggctgcctttgcttctgggtacaccatttacctcttaatccttttctgtctacttcccacattggtagatgctctctttccctcacacatagacaagagtgacatgggagccagcttgtttttccttatgtgtctcttttctgtgaaaccccaaacctaatttcttgtattcagaatagtaccggaagctgtacctctcatcctaggggtagtcagtttgttcttaacagctactacaaaacaagtacaagcatcagagcgacagcaaagctaaccataacaaaacagtatacccagcggctatggagcctttagagaagggaggctctgactcagcagcagtcacttacctgcaatgggcctttaagcgttaagcccacagattggtccgcccagttctctcctcttcctggggtgctgccatgtgagcactcactatcatacatgcctgccaccagttagaaccgacttgcaccagacgttccttgctataacagactaaaatcagagtcagaccaaacctccgtttccttggttgccccatgaggtgtgttggtcacaggcacaaggagcattactaacccacagaatcagaaacaaacagcatttagctgaaccttttgaccataggttgatcaatgtattatcagtcctgttctggggtggaaaccacaactctaccctcctagtaataggagccgcctaatcacttaacaagtattcagccagcatcctcttaacttgactttcttcagctcaccacgggaatggcactggggtgaaggtattgtatggctgctacattttctcatcagtatatattttccttgctagttcttatcatattgtgaagaaaacaagaaaaacattgttagggaattagtgcagagtgctatgaaattgttcagaaattggcgcagttgacaggaagtggccccgattctggctggacagtgccatttcagcaaaggagctggcataacaccgtgttcacccataaagtccttcttgtcaaagtgtcttatggaattaactcctcatgcatggatcaataaacctcaccaatttgccaatgtaattaagaggtagcagattaagcattactaattaagctcaaagtataatagaatgaagaaggttatttttgtgaattgtgctgctggagtttcatcaaggatgttgcaattcttatagaggatactccagggcaggttgggaagacagtctcctctactttgaggggaaggagcatttaaccttatgtattttaagtcattgcaagtttttataactaaagagtgaacggggcatcagctgtgaggggcgtagagtgagcccaagccagctcctgcattggaatgtagagcatagcagagttagctgtgttctagcagagcacttgggatactgagaagggtcagacaaacaacaaagtaaggcagcgctctctgacttaagctccagagatccaggccctgcaaagagatcagagaaaagtacaagccctgccctggggccacgggaaagctgaccagcgtcagagaaccccaggatgggctgcattggaccatttggcctgggcctagaaaaccagcttattattcaatattttcaggaaataataacttggttcccaattgctgctggatggtattaagtagagaggagaaaaagtttcttcccaccctctgaaggagtaacacttgcatccatgaagtatactcagagttgacagataaccaggagaaagttgaagtttattaagtacatgggaatagcccaagacaggaaagtgactacccaaggaaactcctttacccgtctcttagaggatgaacaagctactaaagagtaattactaaagagtaatgaactcttagaaaaatagagcctagcctatggtcagctgtggggctctgttcaattccagtctctattcctttgataatgtttgtattccctggttagtgagattcccagggaagcaacccatgacagttgtcttccttttggacttagtcaaataaactaaccagaagaagatggacctgcactttagagagaaagaaggaggtggacactgtggcctttaagtgtccagtctctttcttctactcaaagtctacagcatatcaaaggatcataatttgggacattatttcctaaggcccatccctggcagcttgttccctgtctatgttaattatatacccttgaacacataaccaatatctcagtatagtaatatcttatacttgaattcatgtacccaaagtatgttcaaagttgtttttcctttgatatgtatagcaatcccatgaagcaggtgttttctaggatagatgtgtaagaaccaaggccctgtgaaaatacccaatagctcatcactgaggatggggctttgatgttcattgtctgactgggagtccacttttctcatctttgtagcctagttgcctgcctaaatggcccaatccataaagtccacctattgtaaatcctaatgtcccaatctgtgaagtacaccttactaagcaccttctgtactctagatttttaaaagaaaccacaatctttgttaaatgtggttaatagaccatcaattggatagtagaaattaaaattcaataccatatgcgcataaactgtcttcagagctgggcagtgggtagggatatggaagaatgtggggatgagtttttgcagttgatctaagcatgacagagtctgccaagggtacctgtgtttccatgttctttgtctccacattacctggggccatgtgcaggagcttaacctctgctgaccttcctttcagagcagctggagatgcagtgatcgtccctctaacttccaaatctctgtggagattttctcttgacccttgagcatagcacaagataatttaggtttcgatgttaaggctttaagattatttgtaaggaaaataaataactttatgatagttatacttcccagtggcctccacctgaaggatgggatctcaatagcatgtagtggctaagaacatctcttccgcctactttaaggaaatctgtccttaagagaagttgagattgattttgtcaattttacaaggttggaactctaccaggaaaccacattctaggtcactttattttggtcatttggaactataaggatgtttcatagctcttttctatacttatccatgttctgaactctttctagcaggcattttgagcaaatgttttccaaaaacatgagtggcaagttctttgcatctgaagagattataaggtgtggtgggtctaattctgggttaagttggagatccaagatattctctctagcagaagccccctgttagacttagcctcagcatctgtgcaaatgtgtaaatgaataaaacaggtttgcattaccaaccaccaaaacatacatacatgtgcccacacagacatgagaacacatgcatgcagaagccaagccaactgggaaatagttatctgccttgaggggaatctaaaacctagctcatcataaaagcatatttttttaaaaagtacaggcaaatgtataaacagacactacagcactaatttatcaaccaagcaagtttaagtgggacaagataaaaagaaactgtaatttaaatttttttctgtatggtacttgtgtgtaagtgtgtgtgtgtgtgtgtgtgtgtgtgtgtgtgtgtgtgtgtaggaatgtattgaatttgaaagtaatttatggaaagtgctgctaccatggtatttcaaatgctccacaatttgaatttaaacgactcaatgggatcattaagattattatgcatgttttccaaagactttcaaatgacaattttaaaaaatggatgccctttaaaaaccaaagaatgttattgcacttgtatagattgatgcagcttgaagtaattgccaccgccccttctgagcaagtacctgatgatagctgttcgagagacataggtattagcgaggtgccaagctgcacacgcatctgttgataagtaaaaccggattatagagcagactttatggacaaagacttatttcatttagtaaaactgacagtataaaactgtgaaaggatagagtgttcagcatcagtgtgaattcatgccgggctcaagcccagagattgtgatagcagaggctcccagagtgaactccaaaaggaaggctccctcaaacccagtacttctggcctttgctccctttgtatgggtgggtcgccttccactgtttgcctcttacccagtgaacaacataccagggtaggagggatatttaagcatttttcaaaaggaagggtggttgtttggtttgcttttgccaataaacttattattttaatttaaaaagttgtaattctgatctttggaaatatgctcgtcctttagttgtctggattttgggttttttagacagtgtctcactgtgtagcccagcgttaggttattgtagcctaatagccacatctgccttgaacttatgtaccaaacacactgtacagcaatacagaggaacacggttgttcctttccacactgttagaattttattgactttgcaaacaacatcagtttcctaggctgcaatttacaaagcagtctcaatttcccatgatagctagcagttggcaaacacagttcttttattccgatcataattactaatattaactcccggatcacacgttacacttcctacagtaattatatgtatatcggaaggttacagaatgactactaaaaggttaaagaggctgccgagttcaaagaggtcttgatgggagcagaggtggagggctgatcctgattcagagagtcactgcaggtggttagatgagctactgaggaatccagttgaagaattattgaaggttcagagcctggcagcagtagtatcccacatgatcctgacccctctgctgctgaagaagctcagttggtcgagtgcttgctcagcactgtagtggcatgtaagcctagaatcccaggatttgggaggtggaggcagagggttaagaagttccaggttatcttcagctgtaaatgagctcaagaccaccttggcacatacatgaccctttaaagctggaagaaaaatctgataactcgtctcttcattcaagtggaatcaatctgaatacagaccctgctgcttcctattgtgtaagatgaactgatagagactaaggtccttcagatttctgcaagtatttcttcctattaagggaggctgataaaaaaaaagtggttctaattttgttaggttgtcacaaatactacatgagttcatttgtgttaagcggccagcacagtgtccccctcctgattgggcccctgtaatactgactgtcattattgactttaaccctggaaacacctatcacatcacatattttatagcaagtagattataagtatactgtgagcatttgtctcatgttgacatcctttgcttttccctcctgttccactctcctggcagtacttcaacctggatgaatgcactacttgtcttttgcttgccaaagcagctgactattgtgagagaaaaccatgcagccaggcatggtgatgtcattgtacattctgaccaacctagagctgggcctcagtccactctgcattcctactttctgctcccaagcagttcataaatctcacattcttacccagtttctatctgcctcatccctactcctttcttaagggatgcttttgcttcattcttcatagtgacgatggaaacttcaagaagaaactcccttagctactatcttagttggtgctgtgaagagacaccatgaccatggcaactcttaacaaagaaagcacttaactggggctggcttatagtttcagagtccacacaagtatatgtccacacgcaagtaagtgaacacaagcagagctggtcatatctgggcgagactgacaacttgtctcaacatattatactggctttgacactgcactaaagttaagtctttttcccagcaagataaagggcagatagccttcagctcccatgagtcagtagtagtcagactagccaacttttaattattttaaatgatatttgaatatttaaaatacaaatgtttcctttgactacagaaataagttaatatggtataaacaaaagtgaacttaaaaatcatttcctgtcttcttaccccacaggccataacatttcctgccacctctttgatgctaaatacattgaagccttttaatctttttttaaatttttttgagaagctcatacatgtgcatacatgtatgtataaatactgtatttacatttccatacctttttctgtcttttttaatcccctatgttctcttcccattctctctcaaatttatgatgttttctactcaaattattattacacacacacacacacacacacacacacactcacacgctgctgaatctatttggcgttgtgtacacacacacaccaatctgttaaaaaatggacacttcatcttccctctgggactgaacaaatcttttcccttcacagaacatgcaacctttcctattgtatcctcacctctagccaagaactcctaaaaattagaaaattctggagatcttagtctcccagtaccctatgtgatagcctcctctttgcccccatcaaaatatctaaaagtctctatttcaattgcctatttattttccaggtacccaatcagtaatgaacttcccctggggcagaaggactccaatttgttttgtattctttgggccatagttgggtcaagcctgggacgttcggcatagcaggcaagcactcacacctgagttcagtttctcagtgcttttttaccaaggggcaggaagtgagaagttctgaatgaatatgaggtctgaatgaatatgaggcaaagaactaggattgatccttcctctctctctctctctctctctctctctctctctcggattgctatgtggtaagttgttgtgtgcttgttaagtgtttccacaaccgtgctacatgaaattgcatttccgatcctcttagtcatttcctacgaatgttgccaaaattattttcagtttgcttttacattctctccatctcccccacattgtgtagactagaataaaacaatgtctaactaacactgactggtttgtgaggactggggttgattggggtaggagggagagaagggaagttaggctaagagtaattaagaatatatatgtatatatgtatatatgtatctgtatacacacacatacatacaaatgtacatgcatacacacacacacacatatgaaattcttaaggaacaaatttaataaaggattgtttaaactcccctccctttttggtatgaggctagctgctcataaagaaaacaaaactaaagaatagaagtgaatcatgatgtggggaaagtccagggactgtaagtgacgtgtgcctctagtgcctctggtgggcacaggtccacatctcaaacagcccagctgttgtagccgttagcttctcttgaggggctggctgacagaaggaaattgatgttgcttttgagggaggaacagagcagcaaatgtaaagataatcaggccttcctccaccctagtgagaaaaactgaggccgacccctaggtgatgtagctactcacttcactgctgtgcagaagcacaggtaaccagcagcctgccccgctgaggcccatgttttcctttgtggcatgtgtgtggcattcattattcaataggatattcatattcgggctctcttggaagccaccccactcctgtgcagaggcagcttttctgcctctctgtccagtcaccaagagaacctttgggaagctgcatcctcatgtgcagatcagtatggcagatactgggcacagctggaaccttcatgaactcacatgcctttacctaccagggactttatttttattcttgtcttatgtggtagatttacaaagtgtataatttcccttgcaggacaggagacagttatttctgtccttcctctcttccttccttccttccttccttccttccttccttccttccttccttccttcctttcttcttttttatggttatatttggtgctggtttctataggtattgttttgtttcttttggttctcttttgttttgttttttgagacagggtttcattatgtagcccaggcttctacataacactcaattcttttgtctctgcctggtatgcattagcactacaggtatgtaccaccatgcccagccaggagtccttttcttagctgacatccaggtggcctttcttagagatttctcatgaacctctggctgagaccatatgagtaatgggcagaagtcacaagaaaggatagcatcgttcaggaaataaaatgagcctggttttaagaagtgttttggcaacattgccttgtatcctctgctacagtacttacacatgggtgcttcgcattggtagttggcagttctcaatgtgtgttcagtgtttctgacctctggctgtattagaattaacatgggaattttcattttttaattctcgtaccgaggtctatatccttgatcaattgaaccagactttcaagtttgaggcctgacattgacagtttagcattgttttgaatcacataacaataaaatatcgtataaaaactttggggtggggaggcctaggttgattgagggtctaatttaaagtgaatgatcagcagagtttgaatgactcaggtactgtcttctgccactgtcttgctctcaatttatattttgttgggctcagtaggacaaggagggagcaaagaaaagaaagcaaccttttccgaatgcattttcatgtgctaaccaaggattttttttaagaaaaaaagccccagcacaaaggagaaaagtgacagaaattagtctatgcagtgaaggaaggactgctgcaccagaaatcagagccttaggctggtgctgatctggccatgacctttacattgaagggaactcaataaacatcaaggccaggcccagggctcagtagtttaaagtgcttgcttcacaaggctattgccctcatgcctggagcccatggtgaaggtgagagcagatgcccaaaattatcctctgaccaccatacacacatagtggtggtagtgtgtgtgtgtgtctgtgtgtgtgtgtgtgtataagcacaccaatactagttaaattaatgacaacatattacatctatatgtttttgatgttatgttatattattattgcatatttaaaaacttagtgctttaatacaatagttattttttcaataatggctccttgttggtttccacttgtggactcagggacatgaacccactttgctgccaggtctaccattgctctagagctctaaggcccacaggctacagccttagccttggacacaggaggaaagatggtggccagggtctcatcaggagctgcagctgattgccatcctggaagagtgaccccatgttccttctaccatactccatgggctgggactcaggtgataattacaagacacggttggaagtatgactaagctgagccacaaagcagggatgcttcgatgcatgtctagcctgtctttgctctctgtcaccattccagagccattcgtattggtgtggttcagtctgaaacaggaagctgtggtacctcagaacaaactgtggttgatttagctttctctaagtaaaataaacttatatattgttcctatatgtgttccttataataatctaatttgaaccagtgactaaaacatatgttcttggttcaccccagttaggtaatttaacctctaatttctctgttttgaaaattggggacaccttattttttgggaaggaaaaaatatatttacctattaacaaaactcatctaggaggctgctgtttgtaagctgtggatgttgaacagtcagtgaagcagactttcagtctggtttaggattttcatttccaataaagaacagacagaagggtcacggcactcattcctaaggaagtgatgccttactgagctgaggagtggacaggaggttagacgtctcaggcagtggaacttgctgacttgaggacctgaaagaggccactgtggtcagagaccgagagagcagcttgaagtaaggcgggttttgagatggacagaggtcttgctaaggactttgggctttctcccaaaaggcaaagactgcttagctatttcattatttcttacacactcatccattaccagcttttcctgaaaggtctttggcagcagggaagaggcggaggcagcaccatgagtaagtgaacagagaatctgctccctgagtgttgtgggttttagccacaccccgtgttccatatctctctctgtgaagcgccttactttctaaagctgaaagaaagaggagcttaaattaaagcatggctcagctaaaatacaacctaaagagtaaaccatgtttcctgctccagatgtgaacacatctgcattttctatcacatgatttaggagagacaccttgaacttggagccatccctgtctttttgtctgttaggcaatgcttattacagatgacttcctggcacttgtttccagaaagaggtccagcgtaaatccttctgaagccagcatactccacttttctgtacagtgtgagccatggtgctcccccttttataatcttttaaaaaaatatctatcctgactgagctagacctccttaatcttcattccttttcttcctgttgaaatggcaggtttcctctccaaaatttggacaagctttaaaattagatctcaaactgccagcctcacaaatctgccctgacaacaaatttgttgattgtgttttctcctcaagaaatagagtagctctgagaggcattgtgtttagctagctgtcctggaaacacagatacagctctgggctctgagccgaccaagggttgtgggcttcagtgacttggcaaagcacaacaggacagaagccggcagagcatgaagcctgtctttgtcatagtttgctagaaagccagagtcaggctcccagcatgttctttcccagactgccacatgccataggagtgagggacaattcaagtggctgtaacgtatgtaagtcagtccagtctgtctttccatgatgcctcatgtgtgactgttcctacacactaattgttgctcataaattaaaatcatagaattgtctaaacctttacatgtagaaattctgtgaattaggtttgtgtttgaccccagttgtctgaccccatgcattctgtctaatactatactgatcctggcctcctttatagtccccaagaaatcatgtttgaccttgcctttctgattctatgcctggtactgaaatatcttgttcacatttttatgcctaaatgctatatgaccaattccagcatcatcttgtctttgaaaattgattcaaagtgatcattttctgtcttgctctgtgacacaggtctcctcctcctcttcctcctcctcttcctcctccccttttccccctcctcctcctccttcctctcctatagaaaagaaagggagacattacccttgtctgaatgattcagaacagcaggcagacttccattgcaaagctgtatggctgtggcctggtaaggttctacactaagaacaggagttatggtaaggaaagctgcagcatctcattaaagagttactattccatctgactgttcacagtggtgagggatgagctgcctttcaagaggggatcccttggccaaatgattggcacattccaactgtgatgtgaggtctacacccaggctagagatgctattcatgtgaccataagtttttttttttttcataaaggagtttttgttgctacactaacattgcttttttaggagaggcgaccttaaagtcatttaagaaacatatcaagaatgaggactcctaaacatttttggcatctctaagcctctggcaaggatgagtgtatcatgaggcccaaggacacttcttggtacgggatacttgaacctgcttctagttagggtgtggttcagatcttagcacatacctttaatccatctggctggaatacaaacatacccttcgcacacacctttagtcccaaacaatgaaggtaacattagcttgtagaaggaagcactcatgtttgaattgagtggcaggaaacgtgatgaatcagagaaagatttgacagaataggatatgcccaactctccaaagagaggagggggaaaggaaagctgcttaatggagagacagacagcaccggaagaaaagcgcacagtacaggatattctagagttcatggagagcaggacaggagagttgaaccagccagctagggttcaggaagaccaagaaaggatgaatttgctcagcagtaagtctcaggaaacattctagccccagattagattgtacagaggctagaagcttccaaaactaggcctagattagctgaaggaggcagtaagctttggagacaacagttactaccggagaataaaagttacgtttacaatgtctgtcttggccaacttggacagagaacagttggttttccttgaggtctttgcagtctcctgagctggccagtttcttcctcatatccgtgtcttctcatctcctttctcctatgaagatgcatcccttaatgctattgtggaattgggatggtcactgatatggctccttccagctgaaaggggacactggctatggcagttggggttctcctcaaagggcctatcaaaaagactccaaaaataattggtaattttatttgactgttgcctgggaaaagatgtgagggagtaaagacaagaattattagcattccaaatcaagcaggtaactagaagccagaacacgggctgcttttttttttttttaatgtccaaatcaaaatatagattttctttattttaaattaatgaatttatttattctacatgtatgggaattctacatgtattctataagtctgtgtaccctatttgtgcctggtactgtgaaggacagataagggcataacatatcctaggactggagttagtaccttgtaggtgctgggtattgaacccaggtcctctggaagagcagccatggctataaattgctaagccatctctcccgattcccattctctccaacactgaactcaatagtgatgaatccagtatgtttataggaattttgaattacagtgtgaagcctttcctaagatgacatctaaagaggaagagcgtgaacaagtttctcccaataggaactagctcatggctgggacaactgaggtccttttagaaaccagcaaatatattgtgtaaagcaatgtgccaaacttccaaaccatggaggtctggtgttacctccttattctgacataggaaatgtaccaacctaatcacattcaaatagagcccttgctggactctttcatctccaccagccctttatgcttctgcatacacacacaccaaatatgaagacattggcaggagatttgggttcatgattgaatattagtttatgccatatgattgcattaactaatatggcagcaaattcatgcagtcactgccaatttggtaatgtcacagaccaagatagctcccaattcatgtggctgccctgctcctgatgggtctctaagcctctcacacggctggctatgctttaagcctttgaagggtcttcgataatttaggattggtcagtttaaacaggagacctgactagctcacaactgttgaataaacatgtcctgaaaatcctactgatagaagagaatcagctgtccaggcctgtgttttaatttaccagggttttgtgtcatgagcgtaaggaagaagccagccatctggaattttgccatctttattacctagtcatagccctcctcttgtctgtctaacttccagcccttcagtctagagtccctctgtggttgtcagacattgcatggcagctttgtcctcccatgaggtcattgttgaagctgtatgactgcagccttgtaacctactgctaccacagattttccctattgtatatacttatgtctgtgtcttatattcctcgtgtaagagcttttattaagggaagaacctagagcttgtcttatatttgtttcccagtgtccctactgtgggaaaaataatactccaaggtcagaaagcactgagctcaagttgaaatctgatggagacatttgattttggacttggacagacctgttacctcccctgtgaacttggacaaagttgtcaccttccttaaatgtcctaaattctttatcaagaatgtgggaatatctcattagtgatgacttaatgaggctatggtccagactcatgataagtatttagaaatagcattctgcatccccccaggcctctgttttccattgttagtctttcatattcacaaaatacaaaagtaataatgataattgcagtgtgccatgaatacaggcagggcttatgtgtcacattgcaccctcaaatttaaccaactggaaaacaaagtcttaggtatattgatcttttttttttccatttaacatggctgtttttccttaattttattttatgagtatttgcctgcaattatatacgtagagggggataggggtgtgtatgggcgtgtttatatcacatttgaccacaaaggccagaacagatgtttggatacccgggtactgcagttacagaccgttgtgagccaccacagaggcattagaaaccaagcccaagtcttctgcaggagcagcaaatgctcttcactactgagccatctctgcaacccctaacatggtagcttttagggaggaacttaaaattgaccctagtctctgcgatctgtattcttgataatgctccctggtgtttctccagttcaagagatgatgcagatcataaaagtctggcactctccaggagcctagggatgtctgttcgctctctcagacactggaagatctcagagctgtttcctctctgccttgctcttccttctccatcagctttatagctagctatgcctgtgagcatctcgactgctcagccctggacagaatccacttcttttatgtacatcgtaaagtgcaggataggtgtcttggagatatggcttagggagatgagagaaatggataatacatagttgctagtgtagagaagtgtgttagtgagctcccatgtcccacaagtcaacttggacaagctctcctagcctagagtagaggctgggaaggtgttgagcagaaacagcccataacatcagagagaagcgaggttgcaaactctggcaagttcccatctggattttatgctttgatttcatgaactgcctcactggtgaattttgatgttcaataccctttaatacagccatagttgatcagattccaccctcttcccttaaccgtctgattgcctacttgtgatggagaccgatttcattgccagttcagctacatgtgtgcagttgttttcttttctcctgtgtaagccaggtcttctcgattaaaaaaaaaaaatccagatttagtcagctgctttttaccaggtttccattcagactgtcatagtaaaaataaaaagagtccgattttataatatcaccttctgctttaaaaataaataagtaaaagttcccattcaaccagtcagatttttaactctcagcatctccagtaactgctaacgaaatctgcacttcatttccaacatttcactctattcttgaataaaaatgtaatcagaaagaattattgcctttttttaatacccatttaacctttatattcacagtggataccaaaaccacttaaactttcaagctctctttatggactggtatgcagatgcatttttctggagattttttttgcggttgatgaagcatgacatgcaggtccctgctcacttcccagccttaccgttgactgctttccgtcgccttgtcgcgggtctattaattattttaacagtgacttgctgttttaaggaagttctttattaatgccactaaatccttttttatggttgaaatgattcttttttccactattcgaagtatttcgtgattttagtctttgtaatgcgtaagtgtctaactgagcataaagtgctgctggctgtcctccattcttggctttcccagaagaaaggtatggaagtgtaaaccagagctctgtttgcagttttgtttgtaatgtgagcctcacttccctgcttcaggcagctttcatgtacgacagcacgtgacacagtggtgcctttttttttttttaatttccttattatataagtacttcatcttgtagtccagaatcaaattatgcaacagcatagaaaatgaacaacaaaattcttccaaaactccccctagaagaagccactgttaatagcttaagtatactccctgaattttatatgtgctataaaaccatgcatgcatgttcacataaaatacatgcagcatatgaatattattatgtagcttgtttttgcttctattccaacattgcacacttagtgtctttgtctggaaggaggtgcagtatagatctattttttgtgtcctatcaaggcattcagcaggctacatggactacaacattctcagccatttttcttctgataagaatttatgtttcagttttttacactaaaggtaaatttatttatttatttatttatttatttatttacattgcatttcaaaactttcttcatatttgatttctggcgcaggcttctgagttcaaaaagacatatgtggactttcttttcgatgcctattgtaattgcactgatgaagagacttgagtgtgaaagaacggctgattccccacactctctgtaaactggaacatctttcacttttgagactgtctgctgaaaaatttgaaagtataatctcaaagtttaatctgtattattattactattgttattattatttgtgtgtgtgtatatgagtggatgtagttgtgtgtatgtgtgaatgaatggatatagttttgtctggtgtgatgtgtgtgtgtgtgtgtgtgtgtgtgtgtgtgtgtgtgtttgaatgaatggatgtggctccatttccagggttcagtagacacttgcctctgctctttctccattttctggttgggttattcatgtccccctaaagactgctttggaagatagattagttttaccttttggtaatggtgattttgaaaccactcttcagaggtaggacttccttggagacagcctggctgataagctctcctccatatccttaaacccctttttctacagcagccactaccaaaccctgttcaaacagaatagcccattgcccccttctaattcctagtggcctttaaaattaagtttaaacaaaagtttctgagcctacaaggaaagtctgaaaaccctgcttttgaggaaagaaccctatattttgtcataaagagatctagttcctggctcctcaacttagtattagcatataggaggagcatttaaagatttaacttcgctcccgttttataacaagcactaatgtaacataaactatagtttgataagttgatatacttaaaatgcattctgtggctgataccttagtaataatgtatatttgattttgataacagcctcaatatatatttgaaactgagaagtattcatctgtctataaacaatacttgggtttatgattatgataatgattcttacacatatgcttattgtctaccattttatttgttgcatattgatatatttatttaatactttgcttgttttaggtctaatcaaaaatgttacagttctaagtagcttatttgagccaagcttttaattctgtaagttgagtgaatttttgtgagcatcgaggcagctaatactaaatagatgcccacagccatagtctcctgactcctggagcagtatattctccctttcggccaatgctgggtaattgtatgcaggtcattttacctaagcttccatttttttttttctttttcaattgcaagagtgcatctcttgatgtcctgactgggatggagaattgcagataatgacatttctggcttttgtgaatacacttagtatctttaaaaggctgagtaattatctgaatatctttagtcctttgttgttgcagtagtaaaggtaggattactttcagtagtaactgtagcaattaatgtttctattttagcatattataatattatatagaacagtgttgatattttatctgtagtcgcttgtgggcttgattttttttttgcattattatgttttaaattacatatagaaatagttctgggatagttctttcactatccatgaaataacaaaagtcacaactgcaaatggtcaaggagttgccaaatggtcaaaggttggggatgactttccaaatgctcttttccgtggtccacatcttacagaccttgtttcagcaaccacctacaaagttcctagtaccggatcaatcgttaaataagacatcattgagtgggccaaagacttatcataaaatgagtttcccaaatgagacagtagtagattgttacaaaatgaaatagagtagtaggttttcacagtgtaccacgaactccggttgcctggtaactgtcagtaggtagggtcatccagccagagctgttgatgaggctccatagatgctgcttctccgtttctcacagcagtcttcttactcttctactctgacactgtttctactgacacccctcataagctgtgattcctgaaccttgagtgcaggagttgtattgtaggtcatcagttgaggttgagagcaggagaaatagtcttctcaaaggaaaaggccctaattagttatctagttatctgataccaagtagtcaacctttatctgtgcacatgtatgtgtgtgtgtgtgtgtgtgtgtgtgtgtgtgaagctttatacacgtgagcaagttgtatttaaatatatgtgtgcattatgttttatatatgcacatgtatgtatgtatgtgtctatgtatctatgtatgtatgtatctgtgtaggtatgtaacaaaaattaaagaaatagagaccatgaatttaagagagaaggaacaggtttcatcagaagggttagaaggaggaatgggaaggaaaacaactatatattttaatttcaatatgttttaactattcatccaatagtgactccaagactttttggttgtgtagcttacatgaggttgaactttttttttctaactgtcagaatacagtgacagaaatgtagactacttaccagtctggtaatggccattgatcaacaaaattttacttgaatgctcagtaagctgccactctgattgtaggatgttatagttggacctcctcattttattcataaaagactgagtcttataaaaattataatcaaatgatacccagtgagtatctgaaaatgagagttttaatgcataatataaatatatttctatatcagcatatacttggcttagttattataaagtgagcatactctataaagagctctgaagagaagccgtccttatccatacatcagtgccttgttcatgctagtctgacctcctgtctttcttacctagaagatcagcacctagacttacaattccacatatttgtgttggcgactattgtatatgcttatttgggtcattttgggtcatatggtctttctaagacttgaagtggagtcatagtttgttttcatgtagacattttataactttagggctttgaatgttttctcatttcaagttaatctgtataaagtcaacaaggttcagtttttgtttgtttttctcatttatgaatctcaaattactccagcaccatttcatctaaattagttaatgatctgtaggtcacatgaagggtaagtgtctgtctcagcacacagtgccctgttcgtcggtcagtatatccacccatccttgaatcactacattgttttgactgtagctgtatagaaatattgaaatcaagacatatgctatgttttgctttgttcataattattttgagtgttctgattactttgcctttaattagtttgtcaatttttaacaaaactcctgctgggattttgattggaattgtattgaatgtagggataagtctaaggaggaatgaaatatttacaatgctgatttttttctatccttgaatggattatattttttcatttactttatatttactatttacttagattttcaatttgcttaatcactgttttatagttttcagcttggaaatcgtgcacatattttgtaagatttataataagggttttatgattggaaggatttgataaatagacatgaaaaaaataaattccaaagtagtcatggctactatataaaattagggttaatttttacataccaattatcctatgacattattaaatttattaattattggagcccttacttaaaaattcggtgatacttatgaaactaacaagacagaattcatttctagtagacttgtagtagaagaagtgtcagaagtggctttctaggtggaaggaatgtgacatcagattgacacttggatttacacagttccaaatggggtacttgatacagtttgggtgtaatctaagtgtgtccccaatgtttcctatgctgggattcttgctgtgcgaccttcctttccttttatggatcttctcnnnnnnnnnnnnnnnnnnnncccctccccctccccttcctttcctctccccctcttgcctccccccccctctctccacggtgccatgtttccatggatagctgtgggtctaacaaacccacaaatttctatgtgtttagatatccgaaggaaaggaatgacatgagaggagcgcatgtggctgttgaatagtctttctatgactctgcttttcttctctagcatgcctgtttggctctcataaagcaatgataagacatactctaatttgacatagtctgtgtctctgatgataatgtatgttttcttccttttctatgaaacttattacattaatcatgcctattttaatttattcttctgtagttccaacatctgtcttccttctgagtttgttttttttcccttgttatttttgtcttcttttttatgtcttataatcttcattgaaatgctgtatatagaaatgtagagacatgggcttatatatcttacaccaagaactggacatgtgtttttttctgttagacctttcacgtgctgtgattgtcgtggtctatgaggacggaccttggtttggtttgagagggagaggggctgtggttagattaacctcagtgtagtacacatcatgcatgcctcccgatcaactctaaggtggtcttgttcttgcagtagggaatgaatgctttgcctctggaaccttctcttttgcctcctgctaattagaagtggtctgtgtttgacatttctctcagctctctcccatggtacattgctattccttaatgtctgtgggtaaaggggtgtttccggtccctccttagccttgatttttcaggctcttgtttcagtgatcctgcctctgcctccccaaaagttctgggtttgctcctccctctggctgtagtgaacctcacaggtgtgttgagggcaaaaggattggctgtatctttcccatggcgtaagactcttgtgctaagtggaagacaagatagaggatctgtgtggctctgggccttccatgtaactgctgcttgccagcttcttaagatgcacacatcagagccttatcaaggctcctcctctgtcaggcttcactagattgcactgagtggggatggtgaccaggagtagaaactgaaagcctgttttgtctgtagtgtgcaggggtgctatctccttagacttgtgcaaagacagccttcagtgctgactgtcaatgttagttgactttctcattttacaaatagtatggcatttaagagacatttgccccatgtaagcaaatatatcctttctccctttagaggtattggtctttccttaaaactgtgcagccacagctctccataggatttgaataggctgtgagtttctgaattgtctggtataagttgtcctgtatagagcactgctcattcatctctctccatctgtgttggagccagtcatttccacctcagtatcatgttttagtgcattaagaatgtcagcatgccaaggcaggtggttcagaagtctaagtgtagtaagttgaggctagccagaccccatctcaaacaaacataacataacatttccattcagttgttcagagacagatgagggctggggaaatccctcgttatgttcattgtgtcctagcatgaaagcatgagagcagacccacagcacacacatggagacctgggtgtggtgtcaggcatctgtaacctcactatagtaaggaacaaagaggctcattcaccagtcattctaacctaaacgtgtgaccttcaggcatgtcttttgaaagacactcagaaaatatttctcaaagttatgatagactgaaatcattgagctgtagaagcatacttaacggcatatgtataattttttgtgtctatttggtttgcactgctaaggatcagttcaaggaccttacatatttaaagcaggtactctatattgaactatattcccagtctaagatgtattattacatgtcatgttttaaataaaatataatttatgggaaaggacatccatctcaagtggacatagaacatcttttaagctgtaccaccagagtgctatagtcacgtttctagacattagctgggagtctgttattttagtaggcacttagcaaagaaaaggtgtaagaggccgtgtctggagaagcttgaaagatagaatgcagccaccagaaactaaaacaaagaaagaagggaaagaaacaaacacacaaaagcacatcaacagtattattccatgaagactgtcgagcacagctgtttgatgaaaggtagctgggaactggaatctggaaatgtgctcttgatgcctggcccaatgctatccagctgggtaaacacctcacatttttttctctttaaacaaaaaataacagtaacaccagccacagtgaaatactacaatgtcatgtgtcttctaagtgcttcgtaaacattagggtcgtcatcatcactgttatcatctgatatcatttctgtcttagagtcatctgagggatttcatagaatgtagtccttcctcattaagaatgtaaggtggggagggctagagaaaggactgaacatgctgctcttgaagaggacccaggttcaatcccaagaagtctaatagatggctcatatcagtcagtaattccagttccaaggatctgatgtcctcttctagtctccactggtgtactgtaagtagcacacatatatacattcaactcaggcccatagtttctctttaaaagaataaaatatataaccttgcttcatagtgattactgatatttagttcttttgcccttgaacaaataactattcattaagtatcccccatgcatcttgtctggaaatttcacttcaaaataaaattcacatgccgttatataaatgaggatatgggtgatgatggagacgggaagcaggggcatcagtttctgtttccctctggcctgcagtgcagtgggcagatagcattcctcatgtgaccagagaattccagaagcaaacttctagcacagacctctaattccacaatggcagcatgggtggattttacccagtgtttaatgatgaatgtaatccaaacataaaaagatctaaatgcatgctttgaaggaatttgcaaaaatgaggaggagggccccaaaacgtcacaattccttttgtttctttcacatctgtgtttgcttttccccttctcctgtgcatattggagacttgcaaaagattagatttttcaaaccaaataaacattttctacagtcttcactgatagagtgcattagtatgatctttgtagatgtgaacattaaataatccccagtgtggcattctcccgtttattcataaataatttttaaaacttttatcacataccaaagagctaattataatttctcagctttttagaatacctaatatttataatatcagttttggactatctaataaaacttacttgttttactattattttagataggcatacaagttggtgagtctcactgttacatcttcaacaggtgtatagcatgccttggccttcttcccctcttctttctcttgctttcccctcttctctcatgatcagttcttaaatttcatctgtcatgatcaatcatattctacttctaagttatcctcccccattctttcttaagtttttccaaatgctttatccatgttatttcatatctaagaacagtttaattggaagcaacaaaagtatatagttcctgctgttctttagtgtcttggtggttcatgcctttgatcccagtacttgggaggcagaggcaggcagatctgtgagttcaagttcaacctggtctacagagaaagttcaagaccagccagttacacagtgaaactctgtatcaaataacataggtagatagatagatagatagatagatagatagatagatagatagatagatagataggagatagagaaagtactcaaataaataagaattaattagataagtatgaaccaaagatgggtctcccagtaccttagtgagatgctttctcttgtaaagttagtcccagcaaagactctcgtacatttatagcctgtagacttgtgccaatctgattcatataaatttattaactgagtttaaaattggcctttgtgggtagaggttatagcccactgatagagtactctccttacatgaagctctaggctcaactatactaccaccaaaaagaaaaaaaaaagacttttgaataagagaaattatactctataaatactctgaggtatgtaaacctccaaagagactgacaagtactttggttatgaaactagaggaatatccactttcctcaatgatgcatacctgcatgcattcctcagcaaaagcaatgcatgctttgctctatacaagagatcatgctgaagatactgcatgtgtgatatgaactgataatgtattaaatgagagcaattactaatattgtttaattgaatattttaaaagttactaggaatgagaaagctggtaaatgacaataaaattttataccaagtcgtaaatctgaaacacaaaatcttattacttatatatttattaactcatgcttagtgcatcacttcgtggataaacactatgtgtctattagtttcaagatattctctatagttattcttgggttttggctacataatagttgatgctacacaaagtcttaccatgcccttttggaatcattatacttcacagagacaaggctattgagtagttctagtacctacttgagcaaatctaggttatgtaaaagaatttgttcctagaggaattccgttggtaaaacatccatttaatgttctactcggtacattatatcataatcttaggacatatcagaaagctatctcttctcgggggggggggggagtatctggtctacctctttcatttagactatgagaaggttgccccaaaagaagcacaaatttagtatctgggaaaaacacaaaaaacagaggaaagttgaaagaaactttacgtcttcactttatctgtatttataggacactaacttaatttaaaaaagaaatgcaggagaaatagtagcccgagagaataataaaatctctctctcttttggacctttaaacttgttgcagtctattctagcatggaaaccggtctaaggctattaagctttcccattgtttggatacttgaaattccttccaaaggctcccatatgtttgtcccatgtatttctcttcaagtacattaagaggtttcttttgggtcaagtagaattagaatttccttgagttgtttcatgaactactttttcttctcttgttttgcagtgtttatccagtcttggatgagtgcaccttctgtcattctcattcacacttacacacgtgcacttaagttagcctactatataagctccgagcaagcaaataatgcacagttcatctcttgcccaccagaagaagatgagccttacattgcgttaacttatcagccttgagagatactgtattaattagatggaagcagagtctacaagattgccctactttaaatcaggtatcactgggcaagttgcttcaccctgtccaggggtgtcaggcctcttatctatataatagagattaattgtaataattaattgtaaataatattgagtgcttatgattaaatgagagaatacacatccgtcctctcagtgactcacacagaaagaatatcagcttaataatcactactgtggatagagcatctgtaaagatccagacaccaaataagtgcttacccatggggctgactgggattcagtactccaagtactgtcatttaccatctgggtaacaaagctttattatgccttttggacttaatttgaaagccatccccatcatcctatattaaagccagcttctaggccacctggataactgcctggcatagcagtaacacatttaaacaatgtaggcatgatcagatggtccagattttgtttctcctccctagagtattctggagagagagaggggaggtaagaaagagagacagagacagagagagagagagagggagagagagagagagattggagtattatagaaccagttgtatgcttaacttagactcattccctttggccactggttgaagtactgtaaggttagacttggaactgcatgagctgaaataacaggattctgatcccatataagaaaggaacattaagcacgtgggctaaaactacatgaaatatttgttgattaaaaacaattgttttatgggtttaagtgtccgctgcactgtctgctattttgcatgtgttttcaaagaagatcctgggtaaacattgtaattttccaaagcagctggtcttctcctggcattattacagggtcagtctatttccttctaatctgaccataatgccataaaatgctggctgttcccttggcaactgttcagtgtagactagctgctttctctaccttaagccaatactgggctgcaggcaggctcctgcagacagtaaggaagcagttttcctcgctgagggtgtttgtgtcaacaagtcacttgtcagattttctttctattcagagaatcggcatgcaccttttaaaaaggaaaaaaatgaaagtatatctggctcacacgtttggtttttttcgtgctttcttctcagcctgtgtaaaattgctgaccgtggttgacttttctcaagaaattaggaagtacagatgtgagagtctgcatggatacttgcctttgcttttatcctgcgttttaataccttcttgatgtattctgggaaggtttcctgttcggttctcttaatcacatttcctaaattacggtagagcttgtatctccttccatatgtacttcactcaagtccatgttcttagggaaacgtaccctgatacctattttctgcccatgttttctgaaatcatctgccatgtagactattttcttgataagtcacataaaaaaaaacaaaaaaacaaaaacaaaaccttactgtttgggagaagaagaccaagttgtttgaaataactaatttctcttcctgattgctgtaaaaatcttgtatcctggttgttttgaaaaggaagaaatccttcttaagttttgcgtacaaattattggttataagttgtcaaggggatatctggctcctacaaagggcaggcctgttttttacatagaccctatttctaggtcagtaccaataggccctcttcggtcatcccttcacgtcatggtagcttactagagtgccttcaataccagcactggcagccaaagcaggaaatctggacacgggggcagttctcctgcttccagtcagtgtccatggtgttctgcagccttatcaaacctttgtacaaactactcagcactgttagtaatcacctgacagataacctttcagagcaagacctgaatcgagccggcgcatagctttgaatgcagaatccagctccagactcctgaagggctgttaaagcacttagctctgtaggatagatgtgttcaagtgagtacatcatgccggatcctcttctgcagccgtcttaatcaagatgccaagtatcccgttcttcctgcctctgggagtgcatccttttcctgaagcatctcacaccttcttccattttacaagtacttctgctgctactgccactcccaaccccaaaacagcacccagccctgttgggattcctgtgggctgtggtaagtgagacgttttgctcgagtctgaaaagactacagtgtttctgtgtgtacagaacaaaaatggaaaaccagatcatgtgtttatcttagagctaaaattccaaaacctaatctgaagcgaaggaccatattatagtataagacagtgtccagactcactttaaaggaaggctgtgcaggagtcaccttcggacctctatttaacagttccagttcgggctttttgaagccgttttctacagtaggctgttctgtattgagcaaacatacacagatgaaaacccagcaaacagagtgatttaattcattgcttaccctgctgagtatcaaatttcctaactttcaactaatgttctttaattcctctcttttctttcttttctttgtttgtttggtttgggtttttgctttttgtcaagacagagtttctttgtgtaactctgggtatcctggaactcattcattttgtagaccaggctggcttcaaactcgcggaaatctgcctgcctctgcctctgccgctgcctctcgatgctgagatttaaggtgtgctcactgccggcctggcagcttccttcttcttatgaataataatgtgggaagcctagggagtctcttttggcagtcaagacatcttcacttgtgtctgtagcagtttcagtgactgcttttctccctttagctatttcctccctcgagcctcccagcaattgctagggtttcatagttcatgctagctggacagatattactctggagtcctggaaaaagtagaaagtaaggtgagaatcacttagttattctcttcagcaaaactgttaatgttgtttatatgacaggcagtctggaatagagtgccttgggcaaactgtttaacatgtttacaatcggcctccgggcaagtggaaggtaggcgtttccatgcacaaatgtcattgtccttgaagcacccaactccttgtgaacaatattgtgtgtcagcattcttcccaaccaaaagggccaagtctgtgttcagttcagttgacttctgaaagacaagaaaaataacttgccatgagactgttctgattctaatgcaaatttgactgatgttaatttttccttatctctaatgaatttctgtgtgtgtgtgtgtgtgtgtgtgtgtgtgtgtgtgtgtgtgtgtgtgtgtttataaaacctacgagggttttcatctctgtctctaaagaaccactttcgtagaatcccacttttaaaaagatacctgaaagcctattgtgtgcaacatctggctctctggaaatctgtcagaaggaaacttttttttaaaaaaagttgtaaaataaataaaagccgattttgaaagcatttaagtggacatagagattgcacgaggaaggcatttattcgaactgggtaattggcgacacttcctcagggaggatgggaaggtctgtggcacatgatgttagtgggaaagaggggacaaggataagaaccctagatgaagatgtgaaggcaggaagattgacacatgcgtagtcataatcccaggggcaagagggcagaggacgaatggaagagccaggtagagaccaagcagctgagcattttgagagcaaactctccagttgatcggaaagctttgagtgtgctactgcagcctgaataaaagtctgtctgcagctgctaaacagtaagcagatcaaactggcattttatcagaaaaggaagatcttgttctagtcgcagtagatgagaggtctcagaaggttgcgcattgtgatttcagctacacatgcaaatccacaagactcggagctcatttttactgttgtgcaacagggttagttttgttttgagctgagtctcccaaggaagtgtggtaatcagatttctaaatccatcacattaagccctgtcagcagtgaatcattgcctatgtgttaaaggtcaaaaaatttccctttagaaattcattatggtggtgactggaatgtaaatttgaatgttcatgtgtagtgggtgtgaattcaacagataaaaggccagaggagacacagaaaagtccatgttgttattattttaggtcagatatttacaaattgtactttaaaagttatgactgcaaaaacaaagagtgcgtatctttctgtcttgtttgggcaaggctgtgtgctggctagtaagaggaggagccggtgtgctcacactcccagtgtgaactattacactattgttcacatttgcttttcctcactaatgtgcccacccaccttagcagatccccagctcaatttcctggaattgtcctatcagaaagtcctgacttcaggactggatccatgtgtgctgcgtgtgtgctaccattgagttgaagactagtttttattttcagtattcttgaaggtttatcatcattgtcatcactattattgctactactgctactattactattattactatcatcatcatcattattattggtaagtttaactttccgtggagtgaacctagaccactaagctgaactcactctaaatgtttcagagaattaaaatacaacacttctctataaatttttaagaaaaatctaagtttctgtttaaaaacaatcaaaaagtgaatgcagtgtctttacaggttgtgatgcattcaggagtagttacgagacaagtagagtgattgcattaccttccatgaagctcttggggaaaaattgtctatgtgcatgagtgttgtgtctgtgcatgtgtctatacaccacctgagtgctttgtggacatagagtctagaagagggggttagattcacaggactggagttacagacagttgtgagcctccatgtggatgctgggatttgaacctgagtcctctagtgtgcttttaacccctgacccttctctccagccttctttctgtgtagctcttactaatatttccactgcaccaatattgtttcccacgctgctagactttagttctgagcttcttgaacatgctctgagttccaggccatttccatcctcctggccagcacgatgatgctcacgtctagatttggccattttcagagctgacgcacaggcactatgtcaagcctgttaggacagttttctctaaagctctctgggtgatcctgacactacaacatagtgtttccagtggtttccattgtgattttcatatttttacagacattcaattctggactgcatttcaagtcacgtgtaatctcacatgtactttgaatcataaacatttaaatataaataaccaactcatccctttccgttttcaaaaagatttgtgtcagtgtgtgtatgagtgtgtgtgtgtgtgtgtgtgtgtgtgtgtgtgtgtgtgccacatttggatgggtgcccttggaggccagaagaggatgttaagttccttggagttggaggtggcaatgatccacgtaacatgggtgttaggaactaaattaatgtcctctggaagagtagcaagtgctctgaccactgactttctctccagccctatctttctgatttttaaaatgaaattgcagtcatatattcacatatacaaaatatatttgtttatatattatataatatatattctcatatattagacatgtttatagatttgtatataatgtattttactcctaaagatattttccaatatgttattagatgtgtcctttcaaaatctggattttaatagtagtgtaacatttcttctcatgatagcactattatctaacctatgcttgatccctacatattaaggttataaaaccactcttgggcaactttgggggcaataatctaggtcttaccttgagaatattgtagtttattagtttctctgggggttgaatgttgctcacacaaggaagtgagtggtccttagagtgttgcttatgcctggtaccccatttctcctgactcatgaggaaatggctcttttctctgttcctaaaccctcagtgcgtcaaaaagcactgcaggatgacaacaagctcacaaacatgtcctggaaatgaccattccatttctgcttctgagagaggaagagcacacagccatgaaatgttaacagggacttcgcggggtagagaaatattggagctgatatatgaactgatatatgaacaatcttttctcacatataaaaagtagaagccccctccttagaattgggaacaaaacacccatggaaggagttacagagacaaagtttggagctgagacgaaaggatggaccatgtagagactgccatatccagggatccatcccataatcagcttccaaacgctgacaccattgcatacactagcaagatgttatcgaaaggacccagatgtagctgtctcttgtgagactatgccggggcctagcaaacacagaagtgaatgctcacagtcagctattggatggattacagggctcccaatggaggagctagagaaagtacccaaggagctaaagggatctgcaaccctataggtggaacaacattatgaactaaccagtaccccggagctcttgactctagctgcatatgtatcaaaagatggcctagtcggccatcactggaaagagaggcccattggacacgcaaactgtatatgccccagtacaggggaacgccagggccaaaaaaaaatgggaatgggtgggtagggaagtgggggggagggtatgggggacttttgggatagcattggaaatgtaattgaggaaaatatgtaataaattttaaaaaaaaagtagaagctgtctgcttggccccatgaaataaataatcttgcttatcacagagatctgagacaatctctgaaagaagaggatagggagtgttgaggacaagcagaaagctgggagctctaagacccccatggggattatgttccctaataggatgattctcctagatatttacaacatgcttggaaggtaagttagttactacaggatgccaaagatcatcatttactaaagttataagattatttggggcctgcaagctaagaattccagtccatgaattgagcccattgtttttggtctagtggaaaaggcccacccaaacatgtcatggtgggctgacatgactacaataagatgctcaagaaaatcactaaagttagttagagcctgcaagcttgattccagtccatgatgagttaacgccaaagcttttgatcttgtagggaaggcccattgtaacgtgtcacgatgagatgatgtactgaaaccaaccattcactttatgaagcaaaagagggtgaaatgtgagtggggtcccatagtccacttcctgaaaagatcctctgttacctatagactgatgctaaagttccaccacctcctcagagtgcaccataggatcaagacttacatataagccagtttttaagatttttatgtgtatgcaggagtgctcacatatatgtatgtatatatgtatgcatgcatgcatgtatgtgcaccatgtgcagtccagtgtctggggagtggggggagggcgcagagaagaaggcatctggatctcctagaacttaagttacagggaattaggagtttctacatgggttctgggaacaaaaccccatgtattctgcaagaacacacagtgctcttgagcactgaacaatgttcaacctctatttcttgagtttttcaagggatgtttaaaactgaaaccatagtagaaagtatgacagaaatgatcatctctgtatgattctggggcaatgtgattatgttctccactcttttgggtacttctgtgctcatttgccacagccttataaacatttatttctcctctcatacctttattagcttgaatgcattgatttttttaagtctatactcacagggcagaacttgtcactgtgcctaggacacagtgggcacttggtagatgtttgttgaatgaaagaaacatcccagctttcccgtctggtgatctgtcttatgatataacttccaggaatgcattgtgtctaaaattgggtaccatatgtacaggaaattctttctatgtcagcatgaaatccctcccaagtaagtcccttcatacgttgctgttgattgttatatttttttatatagaaaatatactacatggttggccatgtagtaagttggctgtttggagaggggcccatcccttgccggtagatggacataggctagatggcatggctttgcaccttataaagatttggttacttctttgcaagagtcttgtttagaatcccagccaacctgtgagccatagacaaccaagccaggatgacagtcaaggtcattggacatagagagtgagacttgccatctctcctggaagatgaagataaaaataaatggcctcaggatcaatgagaaactttcccctagtgtccaagagggcattaccaagtgtgctgagcaggccttcgtcttcgtgtcttcctaatgcagtatatatatgggagactcacatggccgcactgtgatttagctcgctccttcaaccatgaagtcccttgtgctgcagtgcagatctttgttttgggtagggttcagccagggatattaaacaaaatagtatttggatggaaacttggcgtcccaatttggaaacatttttttattgggtacagtttggggggttggtaagaaaaaacaaacacaacaactatgttgtaaatgttaataaaaagaacaagtaaagcaaattaaaatgttttgtgttgctgaggcctttttgccttcccatgactttaaaatacttgtatgcttttatgataatctataactgctttagtataaaaggcaaagaacaagtgaagttaaagaaaccccaaggggcatgatgtagaattgtagtagccgcttactaaagactgggttgggtattttttgtgtttttgttttgtttttagaatgacttttatgagtccagaaattgtactattaataattgctagcatgggattctaaattatgttttcaaactgccagtactgctattcattaagcctaaaactttgcagccctacccagtgtgtgtctgtgtgatctctggcagactcttttgctgttgccaagttctaagtgattagacttgtcaggatgctgtaattggaaggcatggtcataatctgactcaggggtctctttgtgtcccactgtcatctcagaaatgtgaatgtgatggaagtagtcagatcaggaaggccgtatggtgattctgagtagcgactgggtgatttaagcagtgaggtttcccatgtagaacccatgctctctaaaaatgcattcatctgcttggtaatgggtttaaatgtgatgactactgatagattttggaatgggccatcctgtgtaatgctcactggtgacattgtagtttatggtttatttaactgtaagataaataaaagcaaataaaattttaaattaagctcttttgctatatttcatattgtgcataataacttgttgctggttgatgccatggtgaaaattgctaaagaagagccccatcataggtgagaactgaactcaaattggtactgacctggagtaccaaagtcttccagtggcctaggattgcagtttagatagcatttccttgagctaggcagtgaacttctggatatactgcatcctcaaagatttctggcttcccttgagacatgtgcaatactgtggacctggcatgcaggaaggggggcctattttctgctgaatggcataccagttgcatcaccacagatgtggaattagtgaacatgctttttctgaatttcattaaaattatttttaagtgccatatgtccaatgtcatctttgacacatttatatgttctcctctaagttccaaagagaaacctcacatctctctcataaattaagttgtagaaggcaaaggtgatgatgacatactatgctttagaagcctaacgtaggatggaatagcggtgttgggaatggggagagaaggaacatgtaagaatcctgatgctattatggattggcagaaattcatcttgcatggccaggaacatctgcatcccaagcagaagatattcctgatttctgcgtgtggcttgcttcccatcagtctggtgcatgtcttgcctgggaatatcatgttggctttaatgtcatgacacactcatacataaggactgttcacacggcctttggagtctgtttttcagcccttaacagatgcagaagcccaagtctttctcttggagcctgggcatgtatatgcacacatgaatgcatccttacactttctgatcacatgtgtgtggaaggacttttttcttgatgcatggcagtattttctggggtttgtgtctttgtttttccaacatagaaaggtacttgcaaattgcagttttaccataaactagttgagtggccttggcattactttttagtactcatacctaaaacaagaacagtaaccattcttataacagacttggaatgtggataaagttagcattctggtatgtgtggatataaacatttacatatgcatatatgccagtgagcatatgtgtatatatttatatatgagaacaaatgactgcataagggtccatatacacatatatatcacgttgaacggtttctggcatatcataggtgttattgaagtattaacttagctgtagctggccactgatatgagcacatagtcaaatatggtggtgattgttattattagttccttagctactgatgagatactttatgtgcttgggggcgaatatctgtaacaaagactagtggggctaaggcagtaggctgaacctgttgtggactccatgctagtccagatgcccactacatctttatgagcaaaggcgtccgaactttactatgctttgtcccagacttacatacagacttactgcccagctgaatgtgatggcaaggtgtcttcattagagtcatgcgtcctgactctgggcaatatgagccctttgggttgagtcttccccctgcaagtcggccaccaaccctggagttagatgtatccttcacaacgaggtaccatcaacacttggtgtttcacaggacttctactgtgctgtggaagctttcttcgccaacaatactcttcttaataatcagacaacagacccactccaacttagtagtttttcttcttgccaggtccttataaaggcccttgggtgtctctgttcctgcctttactcaggctcagagatgtcctgttcccatgctattgatgttgacagaagcagggcacatttttcttccacgtgctgctgatctctcagacagaatgtacaagatgttttctcgttgccaaggatacctggtgacataatcctacctagcctttcttttcctctttccaccccctcagctcccctctcaccctctcctcccctgggtctttatgtgctgctctatggagcgtacagcttgtcctctatagactcccatttattttgtctcaggagcagctgccagtggattgactggagaaaacactccactccagacactcccagatgctgccgtagacaggccacctccagagagagcatgcctctcacgctttcttaaacaccgaaggtcttttgggtctttgtttagttttgtattttacactatgacaatgaatccagtttaaattttctgaagatgagggcagataaattattcgatgctgtatagacaccctgccaccgtcaagttcaaggactcttgggtatgaatagaatacccaattttgatagggtagaatttgaataggcaaaagagtgtagacaaagaagaatggggcttagtgtataatgcaaaaatgctcttatctaagaaggcctgtctagagagcttagattggcacaccaggctcactctggtccagcttctgcttgctccagctcccttccttcatgtccgcagtaggttttcattgcactgtctttgactgtaattgctcatcagcaccattaactccagcaannnnnnnnnnnnnnnnnnnnnnnnnnnnnnnnnnnnnnnnnnnnnnnnnnnnnnnnnnnnnnnnnnnnnnnnnnnnnnnnnnnnnnnnnnnnnnnnnnnnnnnnnnnnnnnnnnnnnnnnnnnnnnnnnnnnnnnnnnnnnnnnnnnnnnnnnnnnnnnnnnnnnnnnnnnnnnnnnnnnnnnnnnnnnnnnnnnnnnacccattcccactttttggccctggcgttcccctgtactggggcatataaagtttgcaagtccaatgggcctctctttccagtgatggccgactaggccatcttttgatacatatgcagctagagtcaagagctccagggtactggttagttcatattgttgttgcacctacagggttgcagatctctttagctccttggatactttctctagctcctccattgggggccctgtgatccatacaatagctgactgtgagcatccacttctgtgtttgctaggccccggcctagtctcaaaagagacagctatatcagggtcctttcagcaaacgcttgctagtgtatgtaatggtgtcatcgtttggaggctaattatgggatatggcagtctctagatggtccatccttttgacacagctccaaactttgtctctgtaactccttccatgggtgattgtttccaattctaagaaggggcaaagtgtccacactttggtcttcgttcttcttcagtttcatgtgttttgcaaattgtatcttatatctcgggtatacttataaccaacttaagtagctctctctcgattaccccagctgaaagtaaatcttctgttgacttcctctccactctctttacttcctacgtcactgtcagtcatgttctgtctcacctgatattctctgtgtagttgatgatgtcttagatctaatactagctgtcagaattctgtcgtaacgttaaggtgttatgtcttctgctccgcccctttatggtcagacatagagttcctcacacactacacctgtgcaaagaatgcttcctgaaaaaagggacagaaccacatggcagaaagcaagtactgatgaagacagattccttggctggggctaatgaaaagagtctgattatctaggagatttgaatagtttttaacagattcaaatattaaacaaattacatatcacccccataactaaaccgtctgtgtgttttaagaaagagtcagatatgatggtgctggaccctatcatgagtggctaagatgtgcaccccagagccaccatcagcctagcatgttgttttgaaataagatcacaatcctgtgacatttacataccactgcccagacgcattccagggggcaatctcccactgcacggtacttgacactatagatttatttttttgctaatgtaaatagttcagactagataatattgagagaagcatggtaatttatttcatgtgacgactgtacagaagaacagaagctgagcaggcagaggaatcctactcagttcagatctttgagaaagaactgaagggatggatttttggctggcaagccattaacagtgtaaaaggaagggcagaattaatgctggccgggagtgtgtgaaacccgagaaacgtgaaggaggaaccctgcgctcagcatgggggataggtataagcccagcagtggcagagtaggagattcctcctcttcgctatttagcagccctgtgagtgaattcagagcttgctttgctgtgttccaggctgggtgcctgctggaatgtggactgtaaatctctcagcatctttttcactgacctgcaaacaaccttttctcccatctgctgcctgcacacctgcctcccagtctttgtctgcagagctttctctatccccctgcctctgtctgcctgtccctacctcacctaggccctcttctgagtgtttccatctgacttacttcaaaagaactgaaaacagagagtcaaagaagaggaatcctgtgctcagcctaggagacaggtataagcccagtagtggtagagtaagggacacttccttctgctctgggcacagtctatttagcaatatccatctgactccaggcttctctgaccagatgaagtaacctcaacccttatttttctactctgcaactattacccacacctgctatgtttctgtttcaactatactcgttgagaaaatgtagtaaaaagtagcaaatattcccaactctgtacttacactgtagtaaggtaaaaataatcagtgtgatgtatatagaatattggaagttagtattgatccaggaggaaatgggggtgatatgggaaaatgtgcttggagtctctgctgaaatggaaatcccagcactaccctttccagttgtgtgcgatccgggaggctaactcacttgccctggtctctttcatttctaggtcacgaatcctaagggacattgatgtcttcttgagttgtacagagtagatgacgtgagatcttgttccataaagaatttgatcctatgagcatttaatgattgtttttattaacatgttaaactacatctaagacacacattatatgtatttatttctgtgtctgtacgaatacatctaatcttgtagttttccttgtttcttgtggaaatttctatgagtttatgtatgcctctttctccttgcagactgtggcctatagaaggcagagccgctttgcatttggtcctgtgccctccccagtgcctgcacacaggagacactgggacatttctgttctgggcacagtaatctcgtatgcctggcagtttttagagccttcctctgagctcttgtgccacctccgggcagagctacgttgtctttcccctttctctctgcattctagtcagcatgactatcaagtctgagagaatgaccagcgggttctgtgactcgccttcccctctgacccttcatggaagctctttggatcactgcagctccactttgttcctagaactgtgttctctgcttcaggtcatcttaaccatctgtgaccctctcccactctgtgcacgccctttcccctagccgctgtatccttctatgggaacactgactaattgaagcccagcattacactctctcctttgagcctccgtgtcagttacaaacttcacttataattagatgcctttggctgtcatggaaagctcagagaggtgaagtgagaagtccaagcatatgtagctgaaaaggggagcgtctcgcctgctccaagttccctaaggtggtaggtagcgtggctggaaaatgttggtgcacagagttgaataaccagaattctctacccagctgtgctgtaaactcgacatttgaccttagaggggtccttaaagcctcagcccccacatctgtaaaataaagaagctctcgccctcctcattcaccacgatagtttcatgacccaaaaacaggttaaagaatttcagaaactctaagccatgtgtcaaatgatggggtatgagtaagacccatgacagtataatagtggatagctctctcttgggggatagacatagattttttttttctgcttccacacatgctgcaaaagcaagacctctttaggatttttacatctgaataatgatttacattgattgcagataatctggaatagagctcattttcatttaaacttactagtttagaagtatgcatgtttatagtgtctgacatcaaatattattttaaatagtcccttccaaaatgtatactagggagatagagaagaaggctttcttttttttttcttttttcttttctttttttttttctttctttttttttagcaattttcagtataccgagtcagccccagagatctctgtatccacttacacaagtcaggtacgttaaagggtgccctgtaaactcaccctgtcatatgatagagagcttggtattgtgggtcaagagcaccatgtactccaggaacctagtcacatttgatggatttcttgaattattgctgaactagatgttcttctacaaattagctatactttggtaatagttaattcgacttacagatcttacaggacagaaataatgatccatgagcatagactgagatttctctactatctttctgttaagttcctgagaaagcataagaatttacccagagatggcactaggccaggtcttcacctaagttgtcaagcatggaatgaggggcataaagggtctatccccacatactctttatgggaccagtggcctgcagagactcatagtatatcaactgtatatgaggactaattcaaggagcagtgcttgaaatattaagcagatgagaggaatctatactaaaagttgtgccaaacactgctagagattctgaaatcctttagcctggaggccagggcttaccacagttccctctgtcaggattgaaactgacagtacataagtgtatcctctttctctgtcatctgtcaggggcacactttccatgtagggaatcccacagaaaacaatctattggcctggcctcctaacacttctttgtgttacactgtgtagattggattgtgacccaggccaactattactggccttttcttgaactaaattcgaaattataatattctagatatgattcacccaaggtcagacagtaagtttacataagaactgatgccctccaattccctctgtgatgagttagtaatgcctccctctcttgcataacatataaagctacatatttcttcatacagatcataagatggctactggggaccttgagggctaataagcattcaccatctgtatatgtactgctaaatatgcatttaaaccaagaggggtctcacaaagatggcacctaatatatgtctcctagatttttggtgaggttccagtaagtgaataggaatagtgtttattctgagagactgaaaaagcaagttgaaaggaccttgttctacaagctttctatatcaattgttgtagaggacaggctctaagatggtagttctcagccttcctaatgctgtgaccctttaataaagttcctcatgatgtggtgaccccaaccttaaaattattttcaatggtacttcaaaactgcagttttcctgcagttatgtagtaatgcaaatatgtgttttctgatgctcttagatgatccctctgaatgggtcattggaaccccaaaggggttgtggcccacaggctaagaaccaatgccctaaggcaattgcagtgatctgtccttgtgggtgacttgactttattatagctgttctctgtgagtgccaggtagacctgaatttgcttccaatgcccagaacatgaatgtgtagagatgtaacttaatcatgagcacattacattatattaggatccatctcagtagactgaagagagagaaactcaccaggcaagatgagttggctctggaaccaaagatgggcctttggttgttagccagcaaaaagtcttggctccgaattgtatacctgttgggtaatacattgtgctaatagtctaaatatcttaagaatgtatctcaaagacccaaagaagcccctagaagctgtaagataacagatttacattatctaaatccagtgagatggttaggcaggtatcaaaagctgcggttgattcattctaaataaagtctgttctgaacagcctgtgatctgataaagtacttcctttatagcttcctgtgtacagtatgggtagtttttaaggttctacagaaccacctccattggcaaggagctaccacaggacattcatttctgtgttaaacaggtctgcatgttgtccagaactgctatgttgaagatagtgcattcctcaaaggcagtgtgtgatttacccatgattgacagatagactggtgaagggcacctcatcctttgtctctggactgttgcaagtgcttttctaacagagctgggctgcctcttggaaagcggactgaagaaaaaggcaagtaacaggtcgatagcactagatctcacaccccaagtttactattgccagcagtataaacgttcatctgtttaactaagctaatgagccctgttttatgtactttcctcgtggaattatgctcatcaagtgagatagcatccatgagcatgtttgttggctgtgaatcaacaaatgattgcaaattattattattaaaataatagccatttgtcagtaaatatttgttgaaactggtccacttcgatggaggcagcctctccagggacctgctgactgaaggcagggagggaagcacccccagctggagttgcatcagtagctcagggttcccagtggaacctgcaggacttgcttcaggaatttgttttttgttttgtttggtaggaacaagaagcccctggagccagttatgttgtcatcaaacttagttggtaattaggctccaaagcaaacctgtgggaagagacaaaagttgaaacatgaattcctctttgcaggtggagggttggatcctagaggcagtgtacacagcttggctatttttatgcttctgcctgcaagaaggttcaagagaatctgagaaaagcaattagcgtccctctgtctgcaggcaaaacccgtttgaacatgtttctatgctcttgaagggctgctagagccttggcagataactgaggaaagattccattgagcaaaatgtcttcacttacaaatccagccactttgcactccacatgagcccccagtttcttttctttttctttttcttttttttttttttttttttttttggtcttttctgtaatcataacccatagagaattaaatgaattcccaggagcacaagaagatgcagggtgagagtataacgaacctgttcaaggatatccctgctctctaacccttttaattagactgctcgtatgtttagattctccttacttgaaagagacaagtgtgttttttaaaatgtgtctttcaaggactatttcccatcagtgctaaatgtttccctgttgtactgaagatttgttttgcttcctttgggatgaaacaatacaagtcttattggtgaaggcaagatgttgtacaaacttacatgaaatttttttcatagccatccatccagtggttcctgtagccccaagtatttgatcccctataaaagttccctacacccagtgtggttcttggcattctgtgcacagggcctattctgttgtcagtatgattcatgttttagtaatagtaaatggtagcaacagataatacgataattatatcatcattaaacctaggttttatccaaggtttctagtggtcatttgcttgtctcagggaaagagaggcttctctagttactgactcccaaagcgagtgactgtgcttgggttccatttcccataagtcagatacaacagcctagttcttgtcatggctgtcagtaagaggatttgtgtaatcagtagaactctgtgccaatagctcccaagtcacagatgaatgggcaccacagttcatagagtatgacagattcacttatccttcccagtttgcagatgaggcaactgagccccgggagacatgtcgaaccaagtatcctaggaagagtttctggcaaggctaatccccacctacttctgagtattttctgtgcttccttctctcatctgaaaacagatatacaggttaacaatttatatactgaaactatcccaaaggaggcagagcgaatccagcactagctatggtagctcacgaggtcatagctagtgaggaaccagcgtaggatgtaccctgcccgtggtagcagaggtacccccaaaagacgctctgttaacataaggaaagtctcaccaagatgtcagtggaaaaaggacaggcaacatggctgcaggaaggtacccatcagtcagacgacttttaatattccagcaccagccttctgccccatctttatagcaaagaaggcacgcctttctaatggcctcatgcacacatcttatttctgtgtaattctttttgcttttgataaagagtccacaactgtttttgatataaacatttgtctaccaagatttataagtgctttcaggcaacactgccttttatttcacaagaattccataaaattccttctgtcaggtcgagttagcttttgcaaaacttcaggaaatgtttgttttaattttccttgagaaaagcgtagagggagacgtgtgcactggcagctgccgtttggatttccctttgtgtgagctttggcttctttacctcttgagcttttgtctttgatgttgctctttaggcataaaatgaaagattattatctttagtctataggcttggaggagggcgatgatgaaacattcctgggtattcatatttctacaacaacaattgatgtggtcttaaagctgtcatgcttgccctagtcttatataataagcatttgatgtgccatgagctttcaatcttgtcacccttccaacactgtatggctatcccatgcattgttttagtgtgagcaacccagcaggggctgcataggcaacccctagctgcactgtgcccctgcagggtgaatcattacactctacacacataggggctacatgcacgaatgagtgtataggtgaatcttctggtttgactccataagtaccttagtcctagaaaaggcatcacctagtgattggcacccacttaactgccttttggtattctgcaaatgttgctttgatatattcagcagaacccaaatgaacagaaattaatttgtctgtaattacagagtaataatttttattatcttcacacaaatagcattgagtccatgattggtctgtttgtagatttcatggccctgcttggtcactatctaaatcctataattgaaatcctatgcaaactccacattgcagacacacggctttgggagaaaagaagccaagcaaagctgaataaggaaaaacaaagagatcattgcctaagaatcaagaaaaggaagcagggtgtaacaaaccaaagggatagtagcagtatatccttttagctttggcagttagggatcgtagcagtacatccttttagctttggcagtttgggagagctgaatgctcgctccctgtctggtggagagggtgatggaacagcttagctacacagattgttctatgcaaatcctcatgtgcaggctgcttttattaaaagtactatctctaatagcctgagccaagtcttgtttggtcaggtagctttcaaatgatggccagtatttttttttttttttttttttttagcaaacgaagtttgtgaaacacttttatattgtcttacagagatcttagtcatctagcacaattattagtaccaaagagcttgttttagcaagttctgacctattcctgcctcctcttccaaaatactctagaaacaacattggttccagaaaatgacagcctgacacagaagcaggtccttccatactgcgggttctcatcccccattcgaaaattagaaatctaatctcttctcagatgctggaagttgaagtcagaatacggagtgacagttttcagtagcaaaaacacttttgtcttttagctggtgaaaattgtcaagggacattttcctttagcttaaaattctctgggaaagatagcctaactgtgcctaccagtagcaaaaggcatggcaactgcactgagccccctttgaattccaacctagccagtagtctggaatataaataagaaaatgtttttattgttgctttaataggatcgtatctaaatatctaaaggctcactacaagcatcacttgtcactttgggctacatttccaagcatacatctctcttatagtgtcaacaaggataactgatgtttgttctgtgctgtgagcccccaaggctccgacaaaacatcgtgcacttcactctgaggcaagcataaatgcagcaatcatcgtgaggctgagtagtacatctgctaaggggttatttagtcaagtaaacagcaagttgacttgggggaggacatagaccgcagaccagggaggactgagccagacagaacagcacagacctcggctgcaaggcacccctcattacttcatcttctgaacctcccctgtaccatctataaatcatgaattaaaaactgcagcttttcatataaaatggtgttattcccgtctcaaaatattcagacagatttatcaccagagagaagaggttaggctcactgaacttttgatcccctgcctcagccttctgagttgctgaccttacaaacgtgtgctaccacatttatcagaggaatttttcagtggcctctagcccctgtttcccaggtttcctcctttagccagatgttggtgaagaagcagtaatgtgttcaaatgttctatgaactccttgtatgttcaggagggattctgtatcagttgggactcactggaacttgtgtggtctggattgtcacttctgatttagaggaacaaatcataaaaaaacaatgcaaaggaagccatattggccaggactgggctgtgtgtgaagcccgccctcggaacagtggatcttgtgcacttgtagcaggtaggacctgagcttgccccatttcacccaactctcttggcctcacaaaagagacattataaccctgtcacttttactggtgaggagaataccaatgaggtggtttgtctgtgccatgacagtccacggggcagttctggtctcccaccctaccctacagtgaagcagttgctcctttattgtgctctggtctcccagctaagctcaggcctcctctgtactcaggatggagggatgtgatgtaagggctatccctgtcacttgggaagccactgcttgtttgggacttgttttgattcctctgtgtggctgtctgagtggccaggatgtctctggcaggagagttctaagagtgtcagggctgtgggtacactataggcacttcacagaccagcctgtatctatagattataactttgcaaagttccttaagaaaccaacctctgaaaccaggacactcccaccttcagtgttttagtgacagtgtgaggggatgggcaaaggggctgaatgtaagcatctgaccccgtggcgcagtgtgggtagtaagaagtcatctggaagtgtagacaaccataccccatgcatgtctcctgattcgtatactgctctttgtgagtcagctttctcagctactgcgtggaagcagggagctacctgaatgactgtgtatgacctcactttttcaaaggttcttatgaataggaattaaagtgaccccctttttagagcaaagttttcatgtgtctgcatttacagtattgacccctttttagatagtccagaggtctttttttttcttttatttttagggaggcgggtgttcccagatatattataacccatatattataatgaaaggttagtccagaggtcttagctaggcctgggtcatgtgtgctctagggggctttttccctgggcttatttattttgaatatacttacttcttctttttttttttttttttttttatttatttattatatgtaagtacactgtagctgtcttcagacactccagaagagggcgtcagatcttgttacagatggttgtgagccaccatgtggttgctgggatttgaactccagacctttggaagagcagtcgggtgctcttacccactgagccatctcaccagcccatacttacttcttctaatttgtatattcgtgttatacttatcaatggtaccaactttagtgttgcttcctagtccttcttacagtgttttcatttttattaaggcatgatttacgcgcaagcaaatacttaggttagaaaccctgagattccatttcacaccagtcagaatggctaggatcaaaaattcaggtgatagcagatgctgtcgaggatgtggagaaagaggaacactcctccactgttggtgggattgcaagcttgtacaaccactctggaaatcagtctggcggttcctcagaaaactgaacatagtactaccagtagatccagcaatacctctcctgggcatatacccagaagatgttccaactggtaataaggacacatgctctactatgctcatagcagccctatttataatagccagaagctggaaagaacccagatgtccctcaacagaggaatggatacagaaaatgtggtacatttacacaatggagtactactcagctattaaaaacaatgaatttatgaaattattgggcaaatggatgtatctagaggatatctcctgagcaaggtaacccattcacaaaagtcacttgatatgcactcactgataagtagatattagcccagaaacctaaaatacccaagatacaacatccaaaacacaagaaaatcaagaaggaagacaacgtgtggatacttcattccttcctagaataaggaataaaatatccatggaaggaactgcagagacaaagtttagagctaagatgaaaggatggaccatccagagactgtcccacccgggagtcccataatcagccaccaaatgcagacactcttgcatacgtcagcaaaatcttgctgacaggaccctgatagagctgtctcctgtgaggctttgccagtgtctgacaaataagaagtggatgcttacagtcatctataggatggaacacagggccccaatggaggagctagagaaagtacccaaggagctgaaggggtctgcacccctataggtggaacaacaatatgaactaaccagtatcccccagagcttgtgtcgtgtctctagctgcatatgtatcagaagatggccgcctaggtcatcactgggaagaggccccttaatctagcaaactttatatgccgcaatacaggagaaagccagggccaagaagtgggagtgagtgggtaggggagcagggcgggggagggggggataggggacttttgggatagcatttgaaatgtaaatgaagaaaatatctaacaaaaaacaaaaattttaaaaaattgaaaaagaaaaagaaaaaaaggaatgctaagtttgatgagaatgggctgctgtatgtatcactccagaaaactccctcaggtcctttccaaagccagccccacctgttacccggaagcaactgatttccagcctcttgcgctctgtttctttacttgcagtaagtctcggtctctttctgtgtcccttcccgtcccccctccctggaatctgccttttctcattcagcgtgcagtttctgagactcattcattcctgtagctgtatcagccatctgcttctttttgttgtctagtcttccatgaatatgccaaattccacactctgctataattagcttctccattcttctctactttttttccatttttgttatatcgtaaatttgcctaagggaaaatcatgggaactcgagtactgaatatgtggcataaatgtatcttatctcagtaacaagggcccaagggaccccagcattaaacacagctcattgtctcctgcagttgtgttgcttcactggtgttatggaaaggtaggtagagcaaggcccagcagccaagagtcttgctctgacttggcagggtaactgcctacctgtcgctagctcttttgctgtgtctgcaaacttacctggctggactgggccgccctccaggattttcacctctggcatccagttgtgctctaataaaatccctccttgactaggaatatttcatctttcatagttgctctgtagtccatcttctgcatcaaaatggtaaattagcccagttattatcttattgaacacaacatctctgatcccatttcctttaccatatgccagacttattttctctgctcaaagtccgttggatatttctgaagaacatgctgcaaagaaaacgtaagaagtgtgagttcctaagttttcatcttctcaagcccttaggctactgtccattggaaaagccattggtgggcaggacacttcactgtatttctgcccctacttcagaattacatgtgcagtccattcttcctgcctcactcccttactgcgctgctgctttagctggtacttcaggtcattttctttcctgctagttcactataggatttgtataatctggatctaggtaccaagtgcttgaacgttctggtctacctgtattttaattagtactgcagaatactcatttttcaatgtcagttctactttagggcttggcttatgtggtgtctcttctcatagaagaaaatgcctcttttatatagttgctcccctggcatagagggcatgctttatttgtttgtttgtttgcttatttacttatttatggtttgggtttttttgtttttttgtttgtttgttggttggttggttggttggttggttggttgttattgttgggcttttcgagacagagatacgctgtgtaacagccctgcctgtcctggaactcactctgtagaccaaggctggcctcaacctcatagaaatctgcctgcctctgcctcctaaattctgggactgaaggcatgtaccacccctgtctggtgacgacctgctttctatgctgtctcttgtcttaagtctgcctctccaggctgttctgtgatactggaacaaggcatgtcataaacagggtggaggagggctgagaactcatctggaaagatttactgcatgaccatgggggcccttattgtcttcacttcactccagtgtaaaaaacgtttataatcattgaccaaacatccaacatatccctgcttcctgttaaatctgcatttgtacatggagtttagtgtcccctaaatgacatgaggattcacactgttacatcaacaaaatcaactcttcaaactttatttcctcactcttgagtcaaagggcgcctactacatacctaatgctgacagatattttgctggctatgaaattgaaacaataactgaaatcatagacccataccccaaagttcaaaatgcagtgaagacaaacacttataaaaccaagaacacagtgaaacaggctgacctggtagatagttctaccagtaaggctttcttaatggcagaggagaaatgcattctgttagaggaggacttgttccagaaattctccagaggagaggacacacataatcaatgtatgaaaatatctagtcagatgtcagtgagaagagcattaagaacagctgagaagccaaagtataagtcacgttccaagggtctttggctacagtaggaagcagactatcctgttgaacataagagaatgggtgggtgtccgcagtgccaagcacttctctctagggagacctgtgtgcggttcgcagcaggaaagacatgtgatcttgtatattccttcttttggtcattgtcattccttcagagacttgaaatatatctgagtttctttgcatccaaactttattatgcacattaaaaatttaaggcatgtggggtagtggagggggaatggcatgtgtttgtgaagtacatgcatttatgaagacctggttcagctgtagagtcagaaaacaacctacaggttattcatttccctctcagtgaggaaatagatgcactgtgggtaggtaccagactcctgctgtgctgatgtcctgccttttgcccctgcttcattccactctgacccaagtctagttaatgcaaggagacagcacttatatattatgccaggcatctatgtgtttaactaccattgagttgctaaagaggaaagagaagcagctacccatataatatacactctccacatttctccaactgatgtctcgaataaccttctgttcctttgtagattattgcaactctgaggtgctatcttgagttaagatctcttgtaatatgtacacttatcatatatgtccacatatttgcagtatttcttttctcttacaaaatattgtttttaccagttatgtagataggagtcaggcaggactgtgcaagactgtgttcaatccctgtctaccaacttatgactttggatacatgtaaattttaaaaaaaagaatctatgttttactgtcttgtatgaaattctaacaatgttttgatcctggagttactttgagaatttaatgagttaaattgattttgagagaaagagagagagagagagagagagagagagagagagagcgccagagagagccacaccaagcatttaccatggagcagacacctattactgaagatctttctctgcttttctttcttcctctcttttttaagtctcctcccaaccaaagacactttccctgaaagaaattcaaggtagattattagctccttaacaaatgctttccagaaccccagagcaatgttttcagcctgtcaaacaagcagagaactgtttttaaagctgtatgtgcctggcctcctaaccccagagttaaggaccaaataggctcaaaacttactgtttttttttcaaatgaagccttccaattcaggagctgtgtgaatgtgccttatatcctctgtgtcagcatggaaaagggacatggaaatgctgagtgacatggcagatattactctggttatctaaggggatgatgggatagcacagtagaggaagcaaaattatgtattttctgatgaaaattaagggtacttagtaggagatcctatgggaaacatctttcaacatgtttgcaaaaaaacccctaagagaagaaatttgattataagattagtaatcaaaataacaatatatcacatgacagaaacctaaatgccatttgtgactgcactacttaggcaggggtatgcaggacacacactagctctagagcctacagttctgtgttctattctgggcgccatgtgttgaagggatccaagataaactggaacttgtgctgagaatagtggttggggggataagagacagaaatagcccataagaaagggtggaaagattccaggtagttatcccaagagaaggctcaaaaaagacaatattttcagtactctttagggttgttgcatagaaaagcaacagacttgcttatagaggacagaaggaagattaaatataatcttctaacaattaagtgggccagtagaatggataccttccaaaagagtctactgtccctagaaatgataatttcaggctagataagccctcaccaactaggggtgctatgcaggaaatgtactcaccaaaccgactggcacagataaagaccaagatctcacttactctaatacactgccctagtcctctgtgaaacttttaactgctataaattcttggttatgcagctaaagaaatatattgcttttgttaattgaaaaaaaattcaagaaagttctcttctctttttttcccactaatttatttatccattttcctattaatgaaagttgttgtcttcgcattcaaagatgttaagaatagcagtaggttgccgggcagtggtggcacactcctttaatcacagcacttgggaagcagaggcaggtggatttctcagtttgaggccagtctggtctacagtgtgagtttcagaacagccaggactaaacagagaaaccctgtctcgaaaacaaaacaaaacaaaacaaacaaacaaacaaagaatagcagtaggtgctctggaagagaatgaatcaccatgcatgatcctgcacccggatgctcatgttgtttcctggaataaataatgacttgcaagacttgaaaaccccatcacccactctatggagaaggaaagtctgatatgtattcttaccttctggtttgtcagtattttcactcagcataccctgtcattttgaataaaactctcttttggaatttacagtccattgatcatgagacttccatgtgtatttttcattcattattacattcagccattcatttgggtatttaccaaacaatttctactgtgttttgtgaaacatatctagtgccaccaacataaaataagtttaaatgtctaactttgaacagcttttacatatatggaagctatgctgtcttaatatgacagccaccataactgcttgataaaaaaaaaaatttttggtcacaaagcaatctttttccctcctatatccagttggtcaggggtctggtagtctctcagccaggaagctctaggtcatagacagtgctgagtgttctgaactgaggcctctcagaggcctggactactgatcagctaccttggaacaagtagggcttctcattgatgtgccccaactaaaggtggactcttcaatgtaataacactgatgtagaaccatcctgtggcaattcaagagaaaagcattttgtgtgtgctgcagagagtcatccagagccacaagactccattgactaggtctgtctcagtagcccagctcttcagcacgtgtcacaaaggatgatggagtacattttgctgtatccctctttgtagatttcatgtaaagaggtaacactctatgcaggtcactgccttaaagaatacaggaccgctgtgtgaaagggcagaagaatggagaaaacagtaacagaggtaacagctgtacgcccttgacctttggaaaggaaaatctcagagcagaggtcccaattaatgaagagcaagaacacagagaagtttgggttggtttctgagcgaagactggagaatgggatacctgtctgcaaagggaaggtcccatagggatccagaaggaccaaactgtccacttagagctggccttcgaaagccttccctcgtgtcagagcacagacactcagaatgatctcttgagcaatctcctctatactttctttcctttgatagtaaacacaccgtctctgttaaaatctgcttcccagctaaaactgaacacagactccaaaccaccaaatcactttggacttttcttttcttacaccccaccaacaactgggatggcatgcatttgaacaaaccaaaagtgatttcgctcttctagttttcagagctttttggctaaatgcagagtgagaaattcatacctttttcaaacagtgtgggttctttttcccagttcctctcatccatctggttctctggaggtcttggaatccaggaaagtgttagttcactgtgctgaaatccaaaaaagactgctaaactgtgaaagaaaatttgcattccagagacaccaaaggagttagtccacaactctgtgcagcaaggagcaaacatctgtatgttctgcctcctttgtctttgaggcagttggaaaaccctgtagcatggaagaaaccctgcattcactgagcctttcctacctagctcatctaaatgtagtgcagagtacagaaagaagaaccaaaacgtgttagtattttatttctagtgtcaaaaattattacaggcgagataccgtttaggagaacagcaaatcgctctgcagcctgttgagattccattcccgtgaatgggttcctcagccgggtgtgtggctctcccatcagcgggcctgtactcaataggaaaccacaatcacagccctgacactggcatgtcaccgtgacctttctaagcccaagtgctgcctttttgtcttccattggcagaagtgtaattagaaggacttgttttcaacagaagccaagtgattgccaaatgtgctcaaatgatctctagaggatcagaggtagctcaccgccctctggctgttcccactgccactcccaagagttagaggcttaactctaactcttttgaaagagatcaagtttggttcaaagaagcttctctgtcacatgcatatgaacaaggagaaatcttccatgaccctggtggttggctcagacctctcatggctgtagtgtaggaaataattgcaatctacacatcaggaagaaaataagcaccacgcagtcctgggtttcagaaaacaggcacgtgagcagaatggtactaagaacatttctagtctctgctcgcatatcatgattctaatggatgattcagggtggtttaattctgatctgcaatgtgcacacaggtggtcattactgtgtatacacatagctggaaagagctttgcttaaactcacattttagaatgttcccctagatgggtcaattaccattgataatcagatggcgttaagcaaaagggtgttgccctactgactgtgtgtatgaataatttcagatcatttatgctcttaggggaggttttaacatttttttgagagataccctcttgctgagatgaaaacaattaatcctaagactaaaacacacctaagatgttactttatttaatgcagttcattttcttctccatacaacaaatactttttgcaggcctgttatgattgcatgctgttatagaggctgataacgtattagtcttcaatgcctagaaacaaataatgatacaggctgccactggcaagaatgatgagaggtgggccttagacagcatgacatgagaatcagtgtctgaggtccaggccagaccctccttttccatcactgtgtattcattttctgctctcaaaggcagaggtgcagcacagaagcaatgaacagtggcttttcacttgtgttcatctggtcttcttgaaccatttgccaccacaagtttggcacttcggaaggcacccagtgattggattggggctagggaacacagacgaaaggatgtcattagggtcctggatgtgacatcttcatcaatgagagtaatactgggaaaaaacatcttcctagtgacagcatcctgctaaataatgtgaaaagggacaagaagccccaaattatatatttgtgaggtgttctgggacggcaggatgctaatgatgagccaaggcattttgtgggatggccactacagggagctagaagaaacttactgattagcagtaagtgtgaactagagaaaatcttgtttgcctttggtgtagaagtcatagattcaaatcctgatcaccttaagatgtgtagcatagaaattctccattctgcctcccctgctgactgctctggagatatctgaggtcttgtgcatgcacagttaatgcccatgtctggtgctagattttctttggtggagataaaggcctggagattactttttttaatgaagaaaagttatataagatcaacattaaagctagcattacataccagaactaaatccttcctcccacatatgggatctcaattaactattaaaaatatatggagacacttccaatcttagcaggtgaggacaccaaatgtcacttaattcttagactttgaaacccagcctcctgaagtcagcagcagttctttgactgtatgtcaggcttgctgcggttctcacgtgaataagccctaacaagactatgccttgaagatgttgtaaagacagctctctgattggacttggctcggaaggaaaggaattctattctttcttcccctctcacgatagtctcactggagttctgtgatcttttaatttgcccctggcatgaaggtagctttacctccctccatttctcagggattctgacacatccaagaaaaggattttggaagacctaccattcaacatggttacaggctttaaaatgacaaaccacttctctgagccttaaggagtagctatactaatgttcgtttttaatcaaaaggttggtttgtttgtttggatacggtctcttgttgacctggaatttgaccagtaagctggacttgatggccagtgagccacatggatctacctctcagcactaggttagaacatgtgccactacacctggctttgggaatttgcatttttcatttttttgtgtatgggtttggggcaatatgtatgtttgtgtaccacatgggagcagtttctccaaagaggatgttgaattatcagaactggggttgcataagggtgtgagctgccatgtgtgttctggatttgaacctgggtcttctggaagagcaggcagtgctgttaatggacaaaccatctttccagtccctcacacctagctttaaaaaaaaaacaaaaacctaagtcctagtgaatgaaggcaggtctctgtgcttccttgataagcactttgccaagtgagacatctcccagctctactcttttgtattttaaagctaatttatataattcaaatataaacaaaacttcatgttcctatattaataattctacatttctctgaaatgttcagttgttcatatgcatgttcttgcctgaaaatactgaattctcccacaccacttcaaagtttttgtttttttttttttttgttacaatattctacctggagagtgagttttgtttgaaggtaggcttgtctaagacatctctcaagggggcttagataatgatgaagactcttattagaacataacatcagttccaaagaggattcaagccagttttcttttcagtggcaaatcaaaccccaccaagaagagaggtgtcatcataaaccacagagagcagcctgttctcccccattttcaattagttcctcttttctctgccatttcaggttgttcatgtctttgtgaaagtccataccctgtgcttttaagcagttgtttgtagatgtgctttcttcctactgctctggaaacttgggaatgaagggagggtatctcagactttcatttctcgctgcacttccagggtgttcagctcaggcagagggagctcattagaggaggcatatgaagtgtttgtttaaagagaattttaagaagtttgaagagttataagcaacaatccaaagagttatcctcagaaagatttcatataaaaaaatgaaagttgaattttttttacagaatccccagctatgtgttttataggtatcatgtgtgtgtgtgtgtgtgtgtgtgtgtgtgtgtgtgtgtgtgtgtgtgtgtttctgcttgtctttctatgtaagcatgtgtatgagtgtgtctcaatgtgtttctgtgtgtatctgtatctgtgtgaatgtgtgtctgtgtgtgtatgtttgtgtgtatgtgtaaaaaaagaaactcatgacatcaccagaaaatagtttagagggttttgatatcatctagcaaaattgggggggggtcataatttttatcaataaagaagattttttattctgattagaaaatcacagtttagagataacactgaatttgctgtcattatttctcgtctgcttgaaacacagatacaaatataaaatatacattgtggtcaggatacaggaggagggcagcccgcagtgcaggacagtttgtggtaggaaatgtgtgctcagctgggaagcagggctgctggggttttaactgggagctcctgggagctcccagggctgcatgaagtctttgcttttggagacgctacagcattgccatcctctgggaagccttcttgatcgtcagaaccaagaagaaattaacattccataagtgagttaggcagtagaactatttgaatttaaataattacactggcacttgaggagaaatttgctgaatcatagaccaagctctttctgtggattggaactaccagtctgttttaaccctcacacttgaagtgtgcttctcacggttcacctcaccgttcatgtagataacgatggcatctgcagaacactgaaggaaatggagcatctgcgttcccagatgataacccatggactctggagaccctcctctgccccctcgtaatcctctcaagtatggtacacctgaaactcacttaagcttactctctggcaggtttttacatggttacgtaaaataattttactttaaataaattatccataatttgttggtttatcttctaattaaaattcatgaagcatcagtgttatgcagaaacaccattgtaaatgctggggcccagcaatgagttttctgtctggtggtgtaggagtttaggagacaggtggtcctaagatcacgatgtgtttcctgacttcatttctttacatgtaacttgtaggtaggaagcctgaatgccttctgttttcagtctaaagtgtgtctacaaaactacagaagaagtacaactcgaacattggagttgctccccattgcatagggaaccgggacgtgtgaatctgcttttagcaatagtcatgatccaggccttggtttctgggtgataccaggatgatagtttgtgaacagagtggtatgcatctcctagcctctatcctttgacactcctcaccaaggagtgagtttgggctctcttagaaggcctccttggcatcacttctgtaaccacagcatttcaagggaagtacatgtggaaagttgtaatctctgggctgaaaaaaattatacagacattctaggtcctaatagtttcattctccctgatattctcttgattacactaaggccaaaatgctccctaaaacatgagatgtcgcctcagcatcttataatccttcctgttctgtgatattgctcatttcaccaaaaatgtaagatcacattttaattttataaaattaaagttttaacacagctccctttctagtcttccaactctccctgcacgtctgtcttgatcgcgggcgctcacactgaccggtgtattcctgtctgacgtgttggcggtagcaccctcttccttctctctgtggcggttagtgtttgtgctgcctgcgtgcctcatttatattcagctgctccttccagctcctctgcctgggaattagaaaagttatttatataacacccagggatataaaaactacaaccagattgtatctcagatttaacaacagttgcactgggaagtcttgagtacaagtttgtttgtgattttagcttaatttttagttaaatttttgtttctcatcacaactggagcatcatcgtttcagaaaagtttatagcctgtgcctttcgactacttgattccctgattcttttctgcttctctcaaatttttgcattttaactatactttgattacagtaacttctcaaattagtatctattgtaaaattaataaaatatagatctagcattgagtttaagtgataaggtcttccacagcttggtaccagttcctgccgaggaccatggactatacaggcccagggcaatgataatgatttatgtagatgatgtagtgtgttccctggatgcctcttcgagactgatgttctcatttctccagctgctgggaatattgactggtgacggctcatagctaggtccctctgtgctaattatcagatgaaggaaagtacttcaatcagagttacatttcattcttggggacgatcttctgtctactgactgatacatgcagctataaagactctcataaagagcttcatgaaagaacagttcttcaggtcacacccagctgtcacatcctccttggatgaatctaggctttggttgtagctgcatcgtagatgtcatctacttctttaaccttctatagatgctgatcacaaggatactgctcagtaacttcctgtgtgaaaagttgtttcagaatctgttccataggctacacaacttcaaactaaagtttaatggaaagagaagagagatcactacctgaccatgtagacgccatagggaaaacatcccataagcaatcctatggtagcatagaatgtgaattatttttactataacagaaagagaatcaggaaagatttcttttccacagtaagtgacctttgagcttcaattaaaaaagaaagagagcagatatttctaagcaaagaaaagtataaggtggcctgggtatgtgcattgttttttaaaggtgtagcaatgagcttagaatggtggagaggaggtgaaactggcaggggagatcagtggtgaggaggaggagccaagtcacaaagcacactgctgattgggagggtccccaagctggagtgtgctcttctgctagctactcacctgtcagagatggcacacatcgaagacggggtctgagcagacttagagacatctcttttgcactaattctattggagcctgtttccttcaaaactgtgatttcacattctcttgatcctactttagaaaagcttaatatgtacatgaagagtccagctttctgtttaaaaataaccatgtataaaaaggtgcaaagcttccattgttgtacttaaatttttatgattagaaaatttctgaaagtctaaagtataaaggcaaacatgtgagtcccactttgaaagctctgtccagggacttcccactcgtttccagtatgtatctgctagtcagaaattgcccttttctcgaattctttctactaataaatgacagtaagctgaagaattggggtaaatcattttacccttgagaaatctgaagtctagagtaaagaaagcatacaaaagaaattattcttctgtgcctctccagccaggacactgtacagtttttaagaagctactactcagctattaaaaagagtgaatttatgaaattcttaggcaaatggatggacctggagggcatcatcctgagtgaggtaacccaattacaaaagaactcacacaatatgtactcactgataagtggatattagcccagaaacttagaatacccaagatataagataaaatttgctaaacacatgaaactcaagaagaacaaagaccaaagtgtggacactttgccccttcttagaattggaaacaattacccatggaaggagttacagagacaaagtttggagctgagacgaaaggatggaccatctagagactgccatatctagggatccatcccataatcagcttccaaacactgacaccactgcatacagtagcaagattttgcagaaaggacccagatatagctgtctcttgcgagactatgccggggcctaacaaacacagaagtggatgctcacagtcagctcttggatggatcacagggcccccaatggagtagctagagaaagtaaccaaggagctaaagggatctgcaaccctataggtggaacaacaatatgaactaaccagtacccccccccccccggagctcgtgtctctagctgcatatgtagcatatggtcctagtcggccatcagtggaaagagaggcccattggacttgcaaactttatatgcctcagtacaggggaacaccagggccaagaagtgggagtgggtgggtgggctgagtggatggggagtgtgtgggggacttttgggatagcattgtaaatgtaaatgaaataaatacctaattaaaaaaaaaaaacagaaactacggggggctggagaaatagaaaaaaaaaaaaaagaagcgcatgcttcttgctctgtctatatgcaagtttgtcaggcccctctctaaattaccaggagtcaagaaagtagaaatgccaacctcaggtgccctcatgagctcagtgacccagttaaccagtaggtcctgagtgtgagctcacctgccctagaggaagtacaagcgcgctccgccttgatggtgtaaaatggggacaaacatacaatagagggagttgtctgggaaaggttagcgtgcccttcgtggccatttgtctgagccagctactttcttggaaacttttttttttctgattttgggacatttttcatgaggctaattttagacatacttcaatttattttctttgtagaactaaccagattacccatcccctgaatagtctactcacagaccataatgctctccctcagaaactgactaagcctggtatgttgctcctggtttggagcaaatgagctgaacctcagagccaagcctcagtgcaaacaaatacgttttcgggtcaagcatattctggtttattcaactccattacagactgggttttaaaaagaagggggaaaaaagttaaagccccacaaagaagcaaaacagaagccccaggaggacaatttccagtcacgctgactcaggtcaccagagtagaagagaagaggggtgtcctcctccaggcttttgccctggacgactctggtattgtaatttcaccacttcaaggcgggggctgggggggggggggaggacggaacctaagagtttccgggagtttagactctgaccaaaggcagctttagaacctcaggcagccatagctcatcggagagaatgatggtggatttgacagttcatcttgggatgtaaagttggaggaggtggaccagtgctgagccaccatggtagttagacaagatttctttattcattctttctgtggggcattcatccccagcttgtttttaatcccaagaagtatactgggacaaagaaatatatcctttaaatataatcccttccaactggaaaacattagctgcttttccggagcactccggttcaaatcccagcacctacatggcaactcacaactgtcttaactccagtggatgtggctccctcacacagacatacaggttaaataacaatgcacataaaaataatagataatgttttgaaaagcctttaaaaaaagtcccttcctttaatgaaactacaatactttatagtaattagatagatagatagatagatagatagatagatagatagatagatagatagataagtgctgtagaaaaatcaataaaatgaaatggggtagaaagaaatagtgtcgtcaggtgggtaatggaagagctttgtaatctgtacattggaaggctagactggcccttgccgtatgtagttcatggactcatgcgtcaagatgtagaagcttggcatttcctgcataggaacgagagtaggcagtaggatgctatcacactacagggccatgaaggcctggcgtaagctaagtacatggtcacacccgtggttcaggatcacattgagcatccttgtgggttaaagggggttacttcagttttcaggcccttgttaactctctacaggcatctctcccttcaaaggctttaaagatctcagggcaggaaggcagctgctccttaattttcatgctctatccacttcggtgtctagctcttgacacatacaccctaatttgattcccgattctagtgagtcacttcagatgccttatttagagaataacatattacatgtgaaaaaagattattggttgagagcacagtctgtggggacagatgaatagttgccctggctgacttgctgaatattagctcttaaggttcacatttattcctaaggcccagcatattttcaaatccaagtcaacctttgttcacttccacaaccagaccgccattttatgttcgacatttctatcaggagttcacttagcctgaattttgagcttttaaatgggagttttggttagggctgtacagagggcatggacttgtctcagtcattacacagataaaatgttagggtctatcagtgaccttactagttctttaatgtagaggcaagttctacttgaaatcataaagcagtcttccaaacatagaacttgtgtggtgtacttcagtaaatacatctagcctaccatgtgtttttataaataaagttctactgaattacaggccccttgctcgtgtgttctcagaggcagccttttgtcagtaccacagatccctactatcggagcctttattgaaaagcttgtcatcactctttgtgtagtagaatagaatgctgtaggagacaagacagcacgaatcctaagacatgggtttgctgcctggggcctgggtgatcctctttgacccactgtgtacatcactttgatgtcgccgatgctgctgcaaaccgccctccctaccgtgctgtggtccacgctaaagccacgctgtcctgctaaccagttttctttctttcctcagaataccctggagcagtgcagtgtgtgttcgaagcccatcatggagcggatcctccgtgccaccgggaaggcctaccacccccactgcttcacctgcgtgatgtgccaccgtagcctggacggcatcccatttactgtggatgcttgcggtctcattcactgcattgaggacttccacaagtaagcaacccctctgccctctgacctgccggtcctcttgacgtgggctcttgctgcccaccactggctgtgcttctttctgagctatgtactctggggtttagggagatgttccaagagtgatctctggcgcatggatggatgtaggaagtccctgttgtcctcccatactctctctattcagagcttctctacagttgatcaagacatccctgtgaagctgtagatatggaggagttgattcagggagatgagaggtgtggccattggcacgttgcacaactcccagctcttcaatttagttattacaccaaaacttgtcctaactgtgacaacctctccaggtttgtcactgtacagttaggagctgctggtacacagatacagagaccaattccatcccacagttccagtgtgagaggcagtcgaatgctatagtcaacatatccatgtcctccctcacccttctccccaaccaaggccttatgtgcctccatgtgtttcctgatgacttcagttgtgccacattttgagaaggatcctaaaagcatatgacgtgtcttcatgtctctgatttcacagcccctctcttccatcacaactgcagggtttaggaaaatggcagttttgcatttttcttcatgtgcttgttagctggctaaccagctcatcctaccagtgtgcatgtttattatggtcaatgtgggaagcttcaggtacggcccgtgagaggtagtacaggctcccttgctgggcagatgctctgtgagtggtttgtaaggctcccaaggttgaagcacattgcttaccactttgggctccgctctgaggctcaagacgggctgtgggtttctttccccactgttgattgtcaacgtccagaaggtactttccacaagcagtgttgggacctgagactcatattttaaaaatgaatttcctgaccactctcctaagtagcagtgaaagcaaaaacctcaccaaaagacgcgaggttgaatgaactaaaaaaaaaaaaaaaaagcccagaagcagaaatttcaacttgaattggacaagaaaaggctcatttttaaagggcagtcacagcataaattgtacttcacattattgctatttttagcttgtaattacacatgaaaaaaaaaacctgcatctatttaagggaagtgaaaagaagccagctcggagtgtttttctgtcactgttctctcctctctgagactccgctgatccaagaaagacagatagctgtaagcagagcacacatgtttgtgttgctggaagagcctgagatgttacacccctcaattaaaaggggaaatcagttctgacaaatgtaaatttatatcgctgccatttttctttctttctagtggtggggagcataattagagacttgtaaccagtgacataagcgtgtgggtctgaacacacactcctgcacagcagaccggagtgactgaagggggaaagaaggctacacatctcaagccccactcctcccctttcagtgcacatgaaaaacaagggttttttgtttttgtttttgttttttaaataatgtctgcacaattggaagttatggaggcaggtggatactgcccttctatggaagagaaaaaaaaaaaaacattccagaatgcttgttgcttagctttgaaagtactagaacacagagtgggtagtctttaatcatagggtgctagccttccatcatgaggtgatagcctcccatcatgaggtggcagctttccgctatggggtgctagccccatcaaggaaaccatggggtgctagccatccagcatagggtgctagcctaccaccatagggtgctagccttccatcatgaggtgctagctgtctaccatgggagagttacttcatggtcagggagaccaacacaggggcagagcctgcttctctactttggaaagcttcattttggttgtcctgagtgggtttctcctgtgagctttcaggatacacatttcagcttggttctgctggcatttccctctacatgccagtagtagctgtgttgagtgctgaaggagaagcaggacagagagagctgggtaaaggtccatgtcagtgctgggcctgtgggaggaggcagggtgtgtgggtataaccaggatacagggcagaaggagcagcacccagaggagagctgctctatcctcctcagaattgatcatttggctcagggatccgggcaggcctcatgcaagcaggagtagaagtatactatgtaagaaacaagggggttcttgatagaggagataaaggttgcctatggaaaagcctctcaaatgtcatctcagagcttcacacttgaaggacagaattgtgaggtttgcctaatgagccatttggttaaggttggctcatgtctatagccagggaattgaactctttcacagacctgatcaccagtagctactaagaactctgtagttaatgtgattaacttaggtcctgtacacagtatgtggaggtggccagtgggtacacacacacacacacacacacacacacacacaccatacacacatacatacatacacagtctcctcattttacctatataactgtattcaaagctgaacttactatctatttttaaaagatttgtttgatcttaccccttcttattcccagggatcatgccacttctatatttgagtaattttgtaagcctatatagtgttgttggacttgtaataacctatacatatgaatagtttcacagtaaccaatttactttttctttttttttttttttttttttttttgcaacaagatagactacatataaaaagtttaggacaaatacagaagcgtggagaattcccaatgcagcctgtgctggaatactgtggaatctatgtttctagtgcaagagcactggtgatgcccgggaaagtcagcttaaactgttggtgtgtgatgcatacacagtgagctgtggtttcttggcaaagatgtcacctgtggtcttagtgagacttccttcccctatgacaaatacctgagtagaaaaggtctgtttgggcacatgattttcagaatgtttagtttgtaatgagctggtcctgagtttctggacccgtggtgaggcagtatatgactgaagaaaggcacgagagaaaagggctattcacctcatggctgccagggataagaagtgccctcagtgtgtgacttgctcgccctaacaagcctaccttctacctccccccaccccccataataccatcgcagtgtgactccaatcctgaacttaatcttttgaagtctaagctgccacaatccagtcacctcctaaatgttcatcagctagcaaccaaggcctaagtctgtgagcctgaagggaacatggcaaattcaaaccatagcactgatccatttagtcattaagttagcattcatttgttaattgccaaaaatctgttggctatgaaatgactagcttcatagctcccttaagatggctatcaacagaaaataataatgtgtgtagagtgcttaacagaacttagtacataaaaggcacttagtaaacaataaccatcaaaactgctttcatcccgtttttattaatatttattagtgtctacttggcaacttaagcactggaaaacaccccctcggatcatgagctctgtagtgacagctcctgcctctctgctttgctaaggatgagtgattggtcaaaaaggacatagcttcagactgcccagagaaggaccatgagagtagacataaagtccaataatatctttctcataaaaaacagtatagcaggtggttcatgtcattgggtattgttcaaaattctcctgtatgagccaatcatagtagtcggcaaagacatagaaataattactaactaaaaaggtaagaagagaaagggggacgaaaaggaataagaagggggggggggtaagaaagtcaatcctagaggaatacatgaacctggaaaaccagtgaggctgtggctacttctgcccttccagcagcctggtagctggggagaggaagtttttaaagctaatatcagaagcctgactattttactactgataacccagattcaaaaataatcaggtaattcaaagcagttttttctccactaaatatcaacttcttgcataaaatatcaattacaacagccttgattactactgcagttgtaccatgatcctcttaatttttctttcacagcaatcaatcgatctgctgcttaattcatatttatttagattgcagccatacagatgccttttggtgcctccaggaaaattaaaacgtacacagagagtataatgtatgtaaaaactctttgacaaccgtgaagttctctgcagagtattagattactatcattatttccttttaagtcttactacaagtagataaattttatcatcattaatcctaaaactattaccatgaaaactttagtaactttcttaatatctcaacatcccctttctctctctcactggtttttcggtgttgaaacaggagctcacccagtagcccaagctaggttggaatttaggatgatcctcctgcctcagcctcttcagtaataggatttcagacatgctggttctgtgtatcttttaaggattgtcttcagttcttatgtgtgtctatgccaaatcatatctcaattcacaccttcacaaatgatatatatgcaaatgtgtgtttgaggtttcctgtggtcaagaattcaagacacattttaacgaaagaggctgtagagattaataatgttaggttatttgtctatggcagaatgaaggaatactaatagaagcaagtcagagggtagccagggcctaccaagacctttctcatccatgtttaggcaggaccttgtttcctgtgttcagctagctcatgcccatggaatagtcctgtgcacaggattgctgcatcctacatgctgcctgctaatgcgttccctggtgttctctgtacaaggcagatccatcctcttccctgacagagagcactacacaccatctggggaggcctctgctgcctcagtctctttcggtcaaggtcacacaggaaatacagcacaggtgtcagcctttgagtctttctgtttccttctgtacccttctcctgtacttgacatctcaccagaattctttctattttcaggaaatttgccccgcgctgttctgtgtgcaaggaacctatcatgccagccccaggccaggaggagactgtccgcattgtggctctggaccgtgatttccatgtgcactgctatcgctgtgaggtctgtggcatccccaagtcagagcaatcataaaacctggagattatggtgcctaacaaagaccttaacactcacagtttctagctctgacacaggctgttaataatacacttacgtcactcaatttaccccactcttcatagccacggccctctccctgtatatattaaatgcttctatttcttattcctccagataagactttgagacctaaacagaaaattatgtcacagaatattgtaaactattaagctagtggaaaggctatgatgatgatggtggtggtggtggtggtggtggtggtggtggtggtggtaccaggtacatctaagagctaattaaccagtcactccagccaaactgaagtgacccctacattcagagagagaccccatcctaaaacataacaaggagaggatgacagggaagacatcagacattgtcaaaatctgacccttgtgtatgtgtaacgcacatgcacacacacacatacatacacatccacacacacacacacagagggagggaggaagggagggagagggtgaaggagaaagagaagatgtaaaactgtgtcttctatgaatcatgttctttagaatatttttttggtttgattccattactcacttcctgaagaaatctcaaagtatcatatatcactggttctttttggcaaagccacacttcctgtggatcataatggtgtctgctgtggcactttgggtcagccttgtttataccctgagtttattgtcagctctaggcctggcttcattcatctctttgccactctcagagagcagagggtaactctgcagcagccatggcctgtgacagcttctgtcaacgtgagcaaggcacaccgtgctaaatgtgactctgattattttccaagcagactcccatttcttctaaaggcaagggctggcttccagtgctacctaacaccttacagaacaggcagtcacagttagcaacagcagcaccatatttcacatgaatgtgactctttgcattttgctcattcatgtccattatgtgccttgaccatcccaaaagctcagtaggggagaaaatgcctgaattatttccagagtagtattcattcttgtgtgcagccttcacagaccgtgccaaacctcacaatggcacccagggagctcatctcctggtctcccataaattcctcttcaccatgctatcccttttggaaaatgttaccaattatcagtcttcccagctcttgaaattttatgtccttgctactattgcagtaaatatgcaaaagccactggtagcctttctacatgacagaaatcactttccttttatttaaatagctataaacttctattcttgttcctgtccattcttctgaagaaatcctaaaactgagtacagagggtaggctgggggaggggatgcttttttttttcttcactgttgtttaggagagaaagctaccccgggagctgagatctgtaggcattttcttctttgtactatgttttgtatttggtgattagaagagtcattttacactatttgtattgttttgttttgagacagggtcttcctatctagtctttcctggctagaattttctatgtagactagactggccttgaactcatagaggtccacttgcctctgcttcctgagttctaggattaaaggtatgtgccactactcctggctaccattgcatttatgttgttaatctctaatttagtttcattcacaatctgctactacttgtactagtgttggggtacaatgtccccattatgaaagcctcttaagaggctcggggaaagtgggtttatccctgtagttcagttcacttacatcactgtcttcatttccttaggactgtggtggtcttctgtccgaaggagacaaccaaggctgctaccccttggatggacacattctctgtaagacctgcaactcggctcgcatcagggtcttgacggccaaggcaagcactgacctgtagagtcaatagccagctcagctgccgagtgcatgccagcaagaagagcgcaacacaagaaaaagataagagaagaagtagaaaaatagaggcatagctcaaccactaggatagtctctgttcttcatgtgctattaacctttctgtagaagcgcatagagaatacgatttgtctacgttcttaccaaatacacatttcacatttaatcatgcaaggccttggtgagcctttgttccaaggacttccacatttttgcacagattatactccgtcccattcacttctgcattcctgagacttttaatcctcatgtttgtctcacttctcatgtggttgaatagatttttagtgtggtatttgctgtcacatgatttttcctgggtgaatgtgccagcctgcaggtgccttaagtcttgtcctgtctgtcacttttcctctggctgtggctacaaaaggcagtcattctgttaccaggtattgaaaaggtgaagtttcccattgcactacacccctgacgtctcttgctaaaataatggtagggggatatttttctatgttaagctataaagagtttatttgaaaaagttaacaggagcccactttagtctgcaactatccaaattcagcagtcaaggctcattggaaaacattgattagccaatatctaaaatgtggggaaataaaaccaagtttcaccactgtgctaaagaggcagaattctaggtgtatctggaaggcccgttgtatttccacaatcccaccctgagagttagctcaccacactctctggatataagactgtcaggcttgcttttggtacatttataaatctatccaactcttcatccttaaagcactgtgaaacttcacctaatatataagcatggttactgcaattaatatttatcttcagaaagataagtattaaaatgaatcaaattcttatctttctttctttcactttatagtgacccaaacctaaatctcttttgcctgaaaattgcaaatcgggacacataaaatgaaattataggaccatgtttcatcttctttaaaaaagagaaaaaaaagctgggaaagattgtgaaaccagagtttattattcttacaatcctctgtaactcaagtacatactgcaggagacattttcctatcatcaacgtgacattcacaccacactttcaaagacaatcgctgaaaaccaaattgtctttctgaggtaaaaatatgcggaatgcctgcctggaatctttatgcgaactcttattagccagtgaaacacttgcttgccaactggagccagttcgcttcgttaagaggagacacctcgctttgcagttgcagttggccattattgtaaagtcagtatctcagaatgagatttctcaaagctttctttaaatcttctacagatatatacctttaaattatggaataccttaaatattacagaaaggtataaataataatataaaggtccctctatagctaacaccgttctagaagtatagtcactttaaattttttaaactccacaaatatctttttatctcttttatatagtactgggagttgaactagggcctcatgtgctcggcatgtgccctggcaccccagcatccccagctcttccgtgtctttttcttttttttttaatctttatgacatgatgattttctagtctgacagttttaattttaacatttagagcaaaaaaaaaaaaaaacctgtttaattacttgtgcatgtttaaaattgcaacccatgcctcaggaattccataaagtttattttacttgaatagaagtcatcttaaaagtgattaaaagaagcccttaggccattgtcacacagcccctctgggtcagtctgtggcttattgactttctccacaggcagtttgcctgttagaatccccaaagctggcattttggggcctttcccttgccccctgctctcacctggcttctcttctcttgagattcatggaggcagcctgtggatctcagaattcagtgggcgctctctagctctgaatccctgtgctgcaaatcaaaggctcacctgtgctggtgacctcgaggaac

SEQ ID NO: 92 - DNA, 3945 bp, Mus musculus
taactgcagatttccacaatgtctcacccatcttggctgccacccaaaagcactggtgagcctcttggccacgtgcctgcacggatggagaccacccattcttttgggaaccccagtatctcagtgtcaacacaacagccacccaagaagtatgctccagttgttgctccgaaacccaagtataacccatacaagcagcctggaggagagggtgatcttctcccaccgccaccaccacctctagaggatcctggtaccatcccacctggtcccggacacttccctcctcctccaccactggatgaaggggctttcaaagtgcagcagggaaatcctggaggcaagaccctggaggaaaggcgctctagtctagatgcagagatcgactccttgaccagcatcttggctgatttggagtgcagctcaccctacaagccacgtcccccacagggctctgctagttcaatagcctctcctccagtttctactcctgtcacaggacataagagaatggtcattccacagcagccacccctgacagcaaccaagaagtccgcaacaaaaccacagcctgcaccccaggctgcacccatcccagtgactccaattggaacactcaaaccccagcctcagccagttccagcctcctatactacggcatccacatcttcaaggcccacctttaatgtgcaagtgaagtcagctcagcccagcccacattacatggctggtccatcctctggacaaatatatggtccagggcctcgtggctataacaaccagccagttcctgtatcgggacagtgtcctcctcctccaacctgtgttggtaccgactatgcatatattccaccatctggacatccgcctgagtctggatatgggtatacctccaaccaaggacgctattatgaaccttactatgcagcaggtcctagctatgggggccgaagtgaaggtgatactgcttatgggcaacaggttcaacctaatacctggaagcgggaagctgcgtatgcccctcctgcaagcgggaatcagaaccatcctggcatgtatccagtcagtggccccaagaagacctatatcacagaccctgtttcagcgccctgtgcaccaccactgcagccaaagggtggataccctgggcctatggggcctccttccatccccccatcattccgcccagaagatgagctcgaacacttgaccaagaagatgctgtatgacatggagaacccacccgctgacgattactttggccgttgtgcccgctgtggggaaaatgttgttggagaaggaacaggatgtactgccatggatcaggtcttccacgtggattgcttcacctgcattgtctgtgatgtcaagctccgagggcagcctttctatgccgtggagaagaaggcatactgcgagccctgctacattaataccctggagcagtgcagtgtgtgttcgaagcccatcatggagcggatcctccgtgccaccgggaaggcctaccacccccactgcttcacctgcgtgatgtgccaccgtagcctggacggcatcccatttactgtggatgcttgcggtctcattcactgcattgaggacttccacaagaaatttgccccgcgctgttctgtgtgcaaggaacctatcatgccagccccaggccaggaggagactgtccgcattgtggctctggaccgtgatttccatgtgcactgctatcgctgtgaggactgtggtggtcttctgtccgaaggagacaaccaaggctgctaccccttggatggacacattctctgtaagacctgcaactcggctcgcatcagggtcttgacggccaaggcaagcactgacctgtagagtcaatagccagctcagctgccgagtgcatgccagcaagaagagcgcaacacaagaaaaagataagagaagaagtagaaaaatagaggcatagctcaaccactaggatagtctctgttcttcatgtgctattaacctttctgtagaagcgcatagagaatacgatttgtctacgttcttaccaaatacacatttcacatttaatcatgcaaggccttggtgagcctttgttccaaggacttccacatttttgcacagattatactccgtcccattcacttctgcattcctgagacttttaatcctcatgtttgtctcacttctcatgtggttgaatagatttttagtgtggtatttgctgtcacatgatttttcctgggtgaatgtgccagcctgcaggtgccttaagtcttgtcctgtctgtcacttttcctctggctgtggctacaaaaggcagtcattctgttaccaggtattgaaaaggtgaagtttcccattgcactacacccctgacgtctcttgctaaaataatggtagggggatatttttctatgttaagctataaagagtttatttgaaaaagttaacaggagcccactttagtctgcaactatccaaattcagcagtcaaggctcattggaaaacattgattagccaatatctaaaatgtggggaaataaaaccaagtttcaccactgtgctaaagaggcagaattctaggtgtatctggaaggcccgttgtatttccacaatcccaccctgagagttagctcaccacactctctggatataagactgtcaggcttgcttttggtacatttataaatctatccaactcttcatccttaaagcactgtgaaacttcacctaatatataagcatggttactgcaattaatatttatcttcagaaagataagtattaaaatgaatcaaattcttatctttctttctttcactttatagtgacccaaacctaaatctcttttgcctgaaaattgcaaatcgggacacataaaatgaaattataggaccatgtttcatcttctttaaaaaagagaaaaaaaagctgggaaagattgtgaaaccagagtttattattcttacaatcctctgtaactcaagtacatactgcaggagacattttcctatcatcaacgtgacattcacaccacactttcaaagacaatcgctgaaaaccaaattgtctttctgaggtaaaaatatgcggaatgcctgcctggaatctttatgcgaactcttattagccagtgaaacacttgcttgccaactggagccagttcgcttcgttaagaggagacacctcgctttgcagttgcagttggccattattgtaaagtcagtatctcagaatgagatttctcaaagctttctttaaatcttctacagatatatacctttaaattatggaataccttaaatattacagaaaggtataaataataatataaaggtccctctatagctaacaccgttctagaagtatagtcactttaaattttttaaactccacaaatatctttttatctcttttatatagtactgggagttgaactagggcctcatgtgctcggcatgtgccctggcaccccagcatccccagctcttccgtgtctttttcttttttttttaatctttatgacatgatgattttctagtctgacagttttaattttaacatttagagcaaaaaaaaaaaaaaacctgtttaattacttgtgcatgtttaaaattgcaacccatgcctcaggaattccataaagtttattttacttgaatagaagtcatcttaaaagtgattaaaagaagcccttaggccattgtcacacagcccctctgggtcagtctgtggcttattgactttctccacaggcagtttgcctgttagaatccccaaagctggcattttggggcctttcccttgccccctgctctcacctggcttctcttctcttgagattcatggaggcagcctgtggatctcagaattcagtgggcgctctctagctctgaatccctgtgctgcaaatcaaaggctcacctgtgctggtgacctcgaggaac

SEQ ID NO: 93 - protein, 607 aa, Mus musculus
MSHPSWLPPKSTGEPLGHVPARMTHSFGNPSISVSTQQPPKKYAPVVAPKPKYNPYKQPGGEGDLLPPPPPPLEDPGTIPPGPGHFPPPPPLDEGAFKVQQGNPGGKTLEERRSSLDAEIDSLTSILADLECSSPYKPRPPQGSASSIDPVSTPVTGHKRMVIPQQPPLTATKKSATKPQPAPQAAPIPVTPIGTLKPQPQPVPASYTTASTSSRPTFNVQVKSAQPSPHYMAGPSSGQIYGPGPRGYNNQPVPVSGQCPPPPTCVGTDYAYIPPSGHPPESGYGYTSNQGRYYEPYYAAGPSYGGRSEGDTAYGQQVQPNTWKREAAYAPPASGNQNHPGMYPVSGPKKTYITDPVSAPCAPPLQPKGGYPGPMGPPSIPPSFRPEDELEHLTKKMLYDMENPPADDYFGRCARCGENVVGEGTGCTAMDQVFHVDCFTCIVCDVKLRGQPFYAVEKKAYCEPCYINTLEQCSVCSKPIMERILRATGKAYHPHCFTCVMCHRSLDGIPFTVDACGLIHCIEDFHKKFAPRCSVCKEPIMPAPGQEETVRIVDRDFHVHCYRCEDCGGLLSEGDNQGCYPLDGHILCKTCNSARIRVLTAKASTDL

(The sequence listing continues in the following parts.)
